(19) United States
(12) Patent Application Publication
(10) Pub. No.: US 2024/0174999 A1
(43) Pub. Date: May 30, 2024

(54) ARCHAEAL PEPTIDE RECOMBINASE ? A NOVEL PEPTIDE LIGATING ENZYME

(71) Applicant: MAX-PLANCK-GESELLSCHAFT ZUR FÖRDERUNG DER WISSENSCHAFTEN E.V., München (DE)

(72) Inventors: Adrian FUCHS, Tübingen (DE); Moritz AMMELBURG, Münsing (DE); Marcus D. HARTMANN, Tübingen (DE)

(73) Assignee: MAX-PLANCK-GESELLSCHAFT ZUR FÖRDERUNG DER WISSENSCHAFTEN E.V., München (DE)

(21) Appl. No.: 17/778,328

(22) PCT Filed: Nov. 19, 2020
(86) PCT No.: PCT/EP2020/082721

§ 371 Date: May 19, 2022

(30) Foreign Application Priority Data
Nov. 20, 2019 (EP) 19210430.5
Jul. 7, 2020 (EP) 20184421.4

(51) Int. Cl. C12N 9/48; C07K 17/00

(52) U.S. Cl. CPC C12N 9/485; C07K 17/00

(57) ABSTRACT

The present invention relates to the provision of new means and methods for enzymatic peptide-peptide ligation. In particular, the present invention provides a novel family of transpeptidase enzymes, herein subsequently also referred to as Adriase (Archaeal Peptide Recombinase), transpeptidase or polypeptide recombinase. The members of the Adriase family, which are characterized by an N-terminal DUF2121 domain with an N-terminal serine or threonine residue were surprisingly found to recombine and ligate substrate peptides in a sequence specific manner via a short DUF2121 recognition motif. This way, compounds like proteins, synthetic compounds and/or whole cells may be linked specifically as long as they contain the motif or the parts thereof recognized by an Adriase enzyme. The ligation reaction described herein can be used to engineer novel molecules in a modular way, with broad applications in both research and pharmacology.

[0001] The present invention relates to the provision of new means and methods for enzymatic peptide-peptide ligation. In particular, the present invention provides a novel family of transpeptidase enzymes, herein subsequently also referred to as Adriase (Archaeal Peptide Recombinase), Jugase, Conectase, Connectase, transpeptidase or polypeptide recombinase. The members of the Adriase family, which are characterized by an N-terminal DUF2121 domain with an N-terminal serine or threonine residue were surprisingly found to recombine and ligate substrate peptides in a sequence specific manner via a DUF2121 recognition motif. This way, compounds like proteins, synthetic compounds and/or whole cells may be linked specifically as long as they contain the motif or the parts thereof recognized by an Adriase enzyme. The ligation reaction described herein can be used to engineer novel molecules in a modular way, with broad applications in both research and pharmacology.

[0002] DNA modifying enzymes allow, in principle, for the construction of any gene and hence for the production of any protein of interest. Yet, this indirect approach is limited to the production of linear amino acid sequences and produces the full-length construct in one step, i.e. does not allow for a post-translational assembly of new fusion proteins. However, many experiments require proteins that are modified upon demand and/or include non-proteinaceous components. Unfortunately, compared to the possibilities for DNA editing, the molecular toolbox for protein modifications is rather limited.

[0003] Only a small set of protein ligation/modification methods have been developed so far. These can be divided into chemical, split intein, split domain and enzymatic protein ligations. However, all of these technologies have caveats and disadvantages.

[0004] For example, chemical methods are frequently used for synthetic or small and pure peptides. However, these methods typically require the introduction of non-proteinaceous chemical groups and often do not provide a pronounced chemoselectivity. Thus, they are not suited for reactions within complex solutions (Chen (2015) Amino Acids 47:1283-99; Schmidt (2017) Curr Opin Chem Biol 38:1-7).

[0005] Another approach relates to the use of split inteins, which are a subset of inteins that are expressed in two separate halves and catalyze splicing of the associated protein domains in trans upon association of the two split-intein halves. Split inteins can be fused genetically to the nucleotide sequence encoding the proteins to be fused. They can, however, only catalyze terminal ligations (between N- and C-termini), are not always efficient, require the maintenance of reducing conditions throughout their production and their considerable size can cause solubility issues (Li (2015) Biotechnol Lett 37:2121-37).

[0006] Further approaches relate to the use of Split domains such as the SpyTag-SpyCatcher system. This technology is based on a modified bacterial domain (SpyCatcher), which recognizes a cognate 13-amino-acid peptide (SpyTag). Upon recognition, the two form a covalent isopeptide bond between the side chains of a lysine in SpyCatcher and an aspartate in SpyTag (Sutherland (2019) Chembiochem 20:319-28). However, these bulky bacterial domain pairs (>100 aa) can be immunogenic and induce steric hindrances in the ligation products.

[0007] Another approach for linking proteins involves ligase enzymes, such as Butelase, Trypsiligase or Subtiligase. These enzymes recognize and fuse proteins via short recognition motifs. Yet, these enzymes have low substrate specificity (Schmidt (2017) loc. cit.). Enzymatic protein ligations are typically reversible, which typically limits the maximum ligation yield. Moreover, these enzymes bind their substrate via hydroxy- or thioesters that are prone to hydrolysis. This irreversible side reaction further decreases ligation yields and necessitates timely removal of the ligation product from the equilibrium.

[0008] The most prominent protein ligase enzyme known in the art is Sortase A (Antos (2016) Curr Opin Struct Biol 38:111-8). Originally isolated from Staphylococcus aureus, where it anchors surface proteins to the cell wall, Sortase is nowadays the most commonly used protein ligase as indicated by hundreds of publications listed in PubMed. Though many homologs of Sortase A derived from different organisms have been studied, the representative from S. aureus remains the most active. In presence of Ca²⁺, Sortase A binds substrates with a so-called LPXTG-motif via thioester formation and cleaves off the terminal glycine. This process is reversible and therefore any compound featuring an N-terminal glycine can be ligated to the LPXTG substrate. Compared to the other above discussed protein ligase enzymes, Sortase A provides a higher specificity however, at the cost of decreased catalytic efficiency (Schmidt (2017) loc. cit.). Despite improvements of Sortase through directed evolution approaches, substrate K_{M} values remain in the millimolar range, far off the micromolar concentrations typically used for in vitro protein assays. This results in poor ligation rates and necessitates the use of high Sortase A concentrations and long incubation times (Theile (2013) Nat Protoc 8:1800-7; Fottner (2019) Nat Chem Biol 15:276-84). Furthermore, since Sortase A binds substrates via thioester the Sortase A-substrate intermediate is prone to hydrolysis. The irreversible hydrolysis side reaction further decreases ligation yields and necessitates timely removal of the ligation product from the equilibrium.

[0009] The prior art enzymes employed in peptide ligation were investigated and/or developed either with respect to substrate specificity or catalytic activity. Thus, there is a particular need to provide new enzyme systems for peptide/protein ligation that offer advantageous specificity in combination with a high reaction rate. Moreover, there is a need to minimize undesired side reactions. In particular, there is a need to avoid an irreversible hydrolysis of reaction intermediates such as observed for the currently known protein ligation enzymes.

[0010] Thus, the technical problem underlying the present invention is the provision of means and methods that allow the enzymatic fusion of polypeptides and/or peptide-containing compounds, preferably in an easy, specific and/or efficient manner, even more preferably with a minimum of unwanted side reactions, such as irreversible hydrolysis of reaction intermediates.

[0011] The technical problem is solved and the above mentioned needs are addressed by the provision of the embodiments characterized in the claims and as provided herein below.

[0012] In a first aspect the invention provides for a polypeptide comprising an N-terminal DUF2121 domain having an N-terminal serine or threonine residue. The DUF2121 domain is annotated in the Pfam database under PF09894 and described as a conserved domain of unknown function. In context of the present invention it has been surprisingly found that the DUF2121 domain has transpeptidase activity when the annotated N-terminal methionine residue is removed thereby exposing a serine or threonine residue N-terminally. In context of the invention “N-terminal DUF2121 domain” means that the amino acid sequence of the DUF2121 domain forms the N-terminus of the polypeptide and is further defined herein below. “N-terminal serine or threonine residue” means that the first amino acid of the polypeptide is a serine or threonine residue. In other words the starting amino acid of the polypeptide is a serine or threonine residue.

[0013] A DUF2121 domain is further described herein below and preferably comprises or consists of an amino acid sequence having transpeptidase activity selected from the group consisting of
[0014] (i) SEQ ID NOs: 2 and 4 to 143;
[0015] (ii) an amino acid sequence having at least 60% sequence identity to the amino acid sequences of (i); and
[0016] (iii) an amino acid sequence as defined in (i) or (ii) wherein one to 10 amino acid residues are deleted, inserted or added;

[0017] As demonstrated by the appended Figures and Examples the N-terminal serine or threonine residue of the DUF2121 domain is crucial for catalytic activity and is, thus, herein also referred to as catalytic serine or threonine residue.

[0018] It has been surprisingly found that the polypeptide of the invention has transpeptidase activity, more specifically sequence-specific transpeptidase activity. Due to its function the polypeptide of the invention can also be referred to as transpeptidase, preferably a sequence-specific transpeptidase.

[0019] Thus, the present invention relates to a (sequence-specific) transpeptidase comprising an N-terminal DUF2121 domain, wherein the amino acid sequence of the transpeptidase has an N-terminal serine or threonine residue. “N-terminal DUF2121 domain” means that the amino acid sequence of the DUF2121 domain forms the N-terminus of the polypeptide and is further defined herein below. “N-terminal serine or threonine residue” means that the first amino acid of the transpeptidase is a serine or threonine residue.

[0020] The polypeptide of the invention is particularly useful in methods for producing fusion proteins. In particular, the transpeptidase activity allows its use in post-translational protein engineering by protein-protein ligation. Substrate recognition is achieved by an amino acid sequence motif, herein referred to as “DUF2121 recognition motif” and defined further below. Within this motif, a sequence of at least 10, of at least 11, of at least 12, of at least 13, of at least 14 or of at least 15 amino acids may be required to achieve at least 10% of the maximum velocity of the transpeptidase reaction (FIG. 9C). Thus, the polypeptide of the invention has the advantage of being specific regarding substrate recognition. The polypeptide of the invention has the further advantage that it has a high reaction rate; i.e. a high number of ligations per time (k_{cat}). In one specific experiment of the appended examples the polypeptide of the invention shows a k_{cat} of around 1.4 s⁻¹ (Example 7, FIG. 9B). In context of the present invention a high number of ligations per time and, thus, a high reaction rate may be a k_{cat} of at least 0.4 s⁻¹, of at least 0.5 s⁻¹, of at least 0.6 s⁻¹, of at least 0.7 s⁻¹, of at least 0.8 s⁻¹, of at least 0.9 s⁻¹, of at least 1 s⁻¹, of at least 1.1 s⁻¹, preferably of at least 1.2 s⁻¹, more preferably of at least 1.3 s⁻¹, and most preferably of at least 1.4 s⁻¹. It is clear to the skilled person that there may be a need to determine the optimal reaction conditions for a certain transpeptidase of the present invention in order to observe high reaction rates. Furthermore, the polypeptide of the invention minimizes irreversible side reactions that hamper reaction efficiency, in particular hydrolysis, that are frequently observed for other protein ligases (e.g. Sortase A).

[0021] Accordingly, the present invention further provides a method for producing a fusion protein using the polypeptide with transpeptidase activity provided herein. The present invention also provides for uses of the polypeptide of the invention in protein engineering. Also provided is the use of the polypeptide of the invention in protein ligation or protein recombination. Thus, the present application provides for a new and advantageous transpeptidase system. As mentioned above, the system is characterized by the combination of a high substrate specificity in combination with a high reaction rate, especially also in vitro. A schematic overview of potential applications is provided in FIG. 16.

[0022] As illustrated herein it has been surprisingly found that the DUF2121 domain requires to be positioned N-terminally and requires an N-terminal serine or threonine residue to have transpeptidase activity. Accordingly, provided is a novel transpeptidase also called polypeptide recombinase, Jugase, Conectase or Adriase. Also provided is a method for recombinantly producing the polypeptide of the invention with the N-terminal DUF2121 domain and with the N-terminal serine and threonine residue.

[0023] Also preparations with N-terminal modifications may be used as long the catalytic serine or threonine residue gets exposed by enzymatic or autocatalytic removal of the residues N-terminally of the catalytic serine or threonine residue.

[0024] Accordingly, the invention further relates to a polypeptide having transpeptidase activity and comprising an DUF2121 domain having an N-terminal serine or threonine residue, and wherein said polypeptide has
[0025] (i) an amino acid sequence as depicted in SEQ ID NO: 2 or an amino acid sequence having at least 20% sequence identity thereto; and/or
[0026] (ii) an amino acid sequence selected from the group consisting of SEQ ID NOs: 4 to 225 or an amino acid sequence having at least 60% sequence identity thereto; and
   wherein said polypeptide having transpeptidase activity further comprises at least one additional amino acid residue N-terminally of the sequences as defined in (i) or (ii); and wherein the residue(s) N-terminally of the sequences as defined in (i) or (ii) is/are removed to obtain transpeptidase activity.

[0027] Furthermore, the invention relates to a transpeptidase comprising or consisting of an DUF2121 domain having an N-terminal serine or threonine residue,
[0028] (i) wherein said DUF2121 domain has an amino acid sequence as depicted in SEQ ID NO: 2 or an amino acid sequence having at least 20% sequence identity thereto; and/or
[0029] (ii) wherein said transpeptidase has an amino acid sequence selected from the group consisting of SEQ ID NOs: 4 to 225 or an amino acid sequence having at least 60% sequence identity thereto; and
   said transpeptidase further comprises at least one additional amino acid residue N-terminally of the sequences as defined in (i) or (ii).

[0030] As shown in the appended examples herein provided are also transpeptidases which comprise indeed additional amino acids N-terminally of the herein recited catalytic serine or threonine residue. It is documented that such transpeptidase preparations are considerably less active in their enzymatic activity. Accordingly, the herein described transpeptidases with a N-terminal serine or threonine residue as a first amino acid of the polypeptide are the more preferred embodiments.

[0031] Also covered herein are variants of the polypeptide of the present invention in which the catalytic serine or threonine is exchanged by another amino acid as long as the polypeptide has transpeptidase activity. The catalytic residue may be exchanged to cysteine or an unnatural amino acid containing a hydroxyl group.

[0032] The proteasome is a large multi-subunit barrel-shaped complex that plays an important role in eukaryotic cells as main protease in the targeted protein degradation pathway. Prokaryotes encode for several uncharacterized proteasome homologs, many of which are not yet recognized due to their considerable sequence diversity. Such distant relationships are usually only detectable by combining information from sequence profiles with structure comparisons. In a prime example, a very distant proteasome homolog was identified denoted as domain of unknown function 2121 (PFAM (v 32.0) family DUF2121 (PF09894); InterPro v76.0 entry IPR016754) in public databases and as Adriase (Archaeal Peptide Recombinase) in the following. In a structure-based sequence alignment (FIG. 1) Adriase and the proteasome β subunit from Methanocaldococcus jannaschii share only 10.7% sequence identity (not counting the gaps)—a value that would actually be expected for an alignment of two random, unrelated sequences (Weidmann (2019) bioRxiv 706119). Nevertheless, both proteins assume a similar fold, with two notable differences: Proteasome β subunits are typically encoded with a propeptide that is cleaved off autocatalytically upon complex assembly. Furthermore, Adriase sequences lack a helical section found in proteasome subunits, but encode for an insertion of two helices at a different position.

[0033] Adriase is found in most archaea capable of producing methane from carbon dioxide and molecular hydrogen (hydrogenotrophic methanogenesis; (Costa (2014) Curr Opin Biotechnol 29:70-5). Amongst those, two Adriase variants exist: While being composed of just the DUF2121 domain in class II methanogens (Bapteste (2005) Archaea 1:353-63), such as Methanosarcina mazei, Adriase from class I methanogens, such as Methanocaldococcus jannaschii, features an extra C-terminal OB-like domain (oligosaccharide binding; FIG. 1).

[0034] So far to the best of our knowledge only a single PhD thesis has studied this domain and identified a certain structural homology between the DUF2121 domain and the NTN-domain (N-terminal nucleophile domain) of the proteolytic proteasome β-subunits (Moritz Ammelburg, “AAA Proteins and the Origins of Proteasomal Protein Degradation”, doctoral thesis, Eberhard Karls University Tubingen, 2011; https://publikationen.uni-tuebingen.de/xmlui/bitstream/handle/10900/49675/pdf/Dissertation_Ammelburg.pdf). The author of this PhD thesis suggested that the DUF2121 containing proteins have caseinolytic activity comparable to the proteasome; i.e. may have a proteolytic activity with a broad substrate spectrum. Yet, this study did not provide any insight in the precise mechanism of action of the family of DUF2121 domain containing proteins and the proposed activity relied only on a single in vitro protease assay conducted with a DUF2121 containing protein from M. jannaschii referred to as MjMPM (GI: 15668728, locus tag MJ_0548) expressed with an N-terminal His-tag that was cleaved of by thrombin cleavage, yet with leaving three amino acids N-terminally fused to the MjMPM sequence.

[0035] The previously proposed caseinolytic activity of DUF2121 domain could not be confirmed and instead it was convincingly demonstrated in the appended Examples and Figures that the DUF2121 domain surprisingly has transpeptidase activity suitable for ligating protein fragments in a sequence specific manner and with a high reaction rate. The appended Examples show that transpeptidase activity requires positioning the DUF2121 domain N-terminally within the polypeptide of the invention and having a threonine or serine residue positioned N-terminally in the DUF2121 containing transpeptidase polypeptide. A mutant variant of DUF2121 in which the N-terminal serine/threonine residue is replaced by alanine showed no transpeptidase activity, as demonstrated in the appended Examples and Figures. Thus, the N-terminal threonine and serine residue of the DUF2121 is part of the active site of the transpeptidase and is, thus, herein also referred to as catalytic serine or threonine residue. This is in line with this residue being highly conserved as threonine or serine throughout the currently predicted DUF2121 domain containing proteins.

[0036] In contrast to the findings of the present invention that the transpeptidase activity requires an N-terminal serine or threonine residue, DUF2121 domain containing proteins were previously annotated to start with a methionine and having the serine or threonine residue found to be conserved at position 2 of the amino acid sequence. The present invention demonstrates that the post-translational removal of the N-terminal methionine is required for DUF2121 activity. The above-mentioned PhD thesis merely speculated that the N-terminal methionine may be cleaved off in analogy to the proteasomal NTN domain, yet the PhD thesis failed to provide any experimental evidence for this hypothesis and failed to provide a teaching how such cleavage can be practically achieved. In fact, the experimental data of this PhD thesis even suggested to the contrary that the serine or threonine residue does not necessarily have to be N-terminal for the alleged caseinolytic activity. The M. jannaschii DUF2121 containing protein used in the experimental analysis, referred to as MjMPM in this PhD thesis, was produced such that an N-terminal Gly-Ser-His stretch from a thrombin cleavage site remained before the methionine residue of MjMPM when the N-terminal His-tag linker was removed by thrombin cleavage. This MjMPM protein was found to have caseinolytic activity in an in vitro assay performed in the PhD thesis, thus, indicating that the alleged caseinolytic activity does not require removal of the start methionine.

[0037] As demonstrated by appended Example 8 an N-terminally modified M. jannaschii Adriase shows no transpeptidase activity under the standard transpeptidase assay conditions. Also appended Example 13 reveals that the MjMPM protein construct employed in the above-mentioned PhD thesis is catalytically inactive under the standard transpeptidase assay conditions. Only when impracticable high enzyme concentrations are used the MjMPM protein construct shows transpeptidase activity. Example 13 illustrates that the MjMPM protein construct has a 200-fold reduced transpeptidase activity compared to a M. jannaschii Adriase variant harboring an N-terminal serine/threonine residue. A massspectrometrical analysis revealed that the MjMPM protein construct preparation contains a small amount of N-terminal truncated Adriase protein in which the catalytical serine residue is exposed (Example 13, FIG. 15). Said truncated fraction is responsible for the slight catalytic activity of the protein preparation used in Example 13. This illustrates that the present invention reveales the catalytic activity and the catalytic active amino acid sequence of DUF2121 for the first time. The new sequence-specific transpeptidase of the invention is useful in numerous applications that involve post-translational protein engineering by generating new peptide bonds.

[0038] By identifying methyltransferase A (MtrA), which is part of a membrane-bound MtrA-MtrH complex as a novel endogenous interactor of the DUF2121 protein of Methanosarcina mazei and studying the mechanism of this interaction, the present invention reveales that active DUF2121 domains recognize substrate proteins comprising a DUF2121 recognition motif comprising X₁DPX₂A sequence motif (with X₁ being selected from K and R and X₂ being selected from G and A; see SEQ ID NOs: 308 to 311), preferably a X₁DPGA sequence motif (with X₁ being selected from K and R; see SEQ ID NOs: 310 and 311) and most preferably a KDPGA sequence motif (see SEQ ID NO: 311). This motif is highly conserved in MtrA proteins of DUF2121 comprising archaea. The terms “DUF2121 recognition motif” and “DUF2121 recognition sequence” are used interchangeably herein. Further it has been surprisingly found that catalytically active DUF2121 with an N-terminal serine or threonine residue cuts the substrate protein MtrA between the aspartate (D) and proline (P) residues in positions 2 and 3 of SEQ ID NOs: 308-311 of the DUF2121 recognition motif and that DUF2121 forms a covalent conjugate with the N-terminal portion of the substrate protein (ending with the amino acids as defined by positions 1 and 2 of any one of SEQ ID NOs: 308, 309, 310 and 311). Dimethyl-labeling mass spectrometry experiments suggest that the covalent conjugate between DUF2121 and the substrate protein surprisingly appears to involve amino group of the N-terminal serine/threonine, with strong evidence for the formation of a peptide bond between the N-terminal DUF2121 serine/threonine residue and the aspartate residue in position 2 of SEQ ID NO: 308, 309, 310 and 311 as comprised in the DUF2121 recognition motif, respectively. It has been surprisingly found that the formation of the covalent conjugate formed between the aspartate residue of the N-terminal MtrA portion and the DUF2121 N-terminus is reversible and that the reverse reaction occurs at a significant and at a robustly detectable rate. This is unexpected since such reversible reaction restoring the previously cut substrate protein has not been previously observed for the proteasome or proteasome homologues at considerable rates. Instead, proteasomal activity involves an irreversible hydrolysis reaction releasing the substrate attached protein fragment irreversibly. In the reverse reaction catalyzed by the DUF2121 transpeptidase, a new peptide bond is formed between the aspartate residue which was previously covalently attached to the DUF2121 serine/threonine residue and the proline residue corresponding to position 3 of SEQ ID NO: 308, 309, 310 and 311, respectively and defining the N-terminal residue of the C-terminal portion of the DUF2121 recognition motif. It has been surprisingly found that when the reaction is performed in presence of two different substrates comprising a DUF2121 recognition motif or one substrate having the full recognition motif and a second substrate mimicking the C-terminal cut product by bearing the C-terminal portion of the recognition motif at its N-terminus (starting with PGA), chimerical protein fusions are formed, i.e. DUF2121 acts as transpeptidase and/or recombinase forming new fusion proteins comprising the N-terminal portion of the first substrate and the C-terminal portion of the second substrate and/or vice versa. This demonstrates that DUF2121 can act as transpeptidase and/or peptide recombinase. Transpeptidase activity is a very rare, yet commercially very attractive enzymatic activity with numerous uses such as in protein engineering (e.g. the production of multivalent antibodies), site-specific or segmental protein labeling, protein localization studies and immunotherapeutic applications (e.g. the production of virus particles fused to a variety of antigens).

[0039] It is noted that the terms “amino acid” and “amino acid residue” are used interchangeably herein.

[0040] The polypeptide of the present invention and the use thereof in protein-protein ligation are linked to a number of advantages vis-à-vis the prior art enzymatic peptide ligation systems, in particular also vis-à-vis the most frequently employed sortase A peptide ligation system. These advantages make the polypeptide of the invention particularly suitable for the use in the above-mentioned applications.

[0041] A first advantage of the new transpeptidase system of the present invention is that the transpeptidase specifically recognizes substrate proteins via a short recognition motif or the C-terminal portion thereof (PGA . . . ). Such short recognition motifs allow for engineering substrate proteins by adding only a minimum of additional amino acids and such minimizes the risk of interference with proper folding and activity of substrate proteins vis-à-vis other protein ligation systems as discussed above. The flexibility of using the transpeptidases provided herein is further facilitated by the fact that the DUF2121 recognition motif can be placed N-terminally, C-terminally or internally. This is different from other peptide ligation systems such as the split intein system which are limited to N-terminal and C-terminal fusions of the intein sequences.

[0042] A further advantage of the transpeptidase (system) provided herein is that the transpeptidase of the present invention catalyzes peptide ligation with a surprisingly higher specificity compared to other peptide ligases of the prior art, like Sortase A, which uses shorter peptide sequences as recognition sequence. This higher substrate specificity of the transpeptidase is particularly advantageous since it allows the reaction to occur also in presence of other proteins (i.e. in complex mixtures or in vivo). The half-maximum reaction rate of the transpeptidase is observed at substrate concentrations as low as about 2.2 μM when the ligation is performed with equimolar concentrations of the substrates, the first substrate comprising a DUF2121 recognition motif and the second substrate having the C-terminal portion of the DUF2121 recognition motif starting with PGA at its N-terminus (see appended Example 7). This value is lower than previously reported K_{M} values for Sortase A and an evolved tetramutant thereof. Sortase A shows a K_{M} value of 7333 μM for the primary substrate when the secondary substrate is used in excess and a K_{M} value of 196 μM for the secondary substrate when the primary substrate is used in excess (Frankel (2005) Biochemistry 44:11188-200). An evolved tetramutant of sortase shows a K_{M} value of 170 μM for the primary substrate when the secondary substrate is used in excess and a K_{M} value of 4800 μM for the secondary substrate when the primary substrate is used in excess (Chen (2011) Proc Natl Acad Sci USA 108:11399-404). Thus, the transpeptidase of the invention combines sequence specificity and high reaction rates. As described herein above a further advantage of the inventive polypeptide is that the half maximum velocity of the transpeptidase reaction is reached already at low substrate concentrations. In context of the present invention low substrate concentration may relate to substrate concentrations below 20 μM, below 30 μM, below 40 μM, below 50 μM, below 60 μM, below 70 μM, below 80, below 90 μM, below 100 μM, below 110 μM or below 120 μM. It is evident to the skilled person that there may be the need to determine the optimal reaction conditions for a certain transpeptidase of the present invention in order to observe the half maximum velocity of the transpeptidase reaction already at low substrate concentrations. The reaction parameters, which may be adjusted to determine optimal reaction conditions are described herein below. The appended examples demonstrate how the half maximum velocity of the transpeptidase reaction may be determined (Example 7, FIG. 9B).

[0043] Another particular advantage of the transpeptidases of the invention is that the DUF2121 catalyzed reaction involves a highly hydrolysis resistant reaction intermediate (i.e. a peptide bond, see FIG. 8) rather than more labile thioesters that are prone to hydrolysis. Hydrolysis is an irreversible side reaction decreasing the production rate of the desired ligation products observed for prior art transpeptidases such as sortase A (Frankel (2005) loc. cit.; Heck (2014) Bioconjug Chem 25:1492-500). As demonstrated by appended Example 11 no products arising from undesired hydrolysis side reactions could be detected in context of the present invention.

[0044] A comparison of Adriase with Sortase (SrtA) and an evolved Sortase A pentamutant (SrtA5*) shown in appended example 16 demonstrates that Adriase is particularly advantageous at low (3 μM) substrate concentrations. However, also at high substrate concentrations (100 PM), Adriase ligates the used substrates at >4000× higher rates compared to SrtA and >40× compared to SrtA5*, even when used at 32× lower substrate concentrations, and produces substantially (˜1.7×) higher yields without detectable side reactions.

[0045] A further advantage of the transpeptidases provided herein is that these proteins are thermostable which is favorable for protein storage and stability. It has also been shown in the present invention that the polypeptides of the invention can be efficiently recombinantly expressed in E. coli and purified at high yields in soluble form. In an experiment depicted in the appended examples the polypeptide of the invention was purified with a yield of at least 5 mg soluble protein per liter of culture. Accordingly, high yield in context of the present invention may be at least 1 mg soluble protein per liter of culture, at least 2 mg soluble protein per liter of culture, at least 3 mg soluble protein per liter of culture, at least 4 mg soluble protein per liter of culture or at least 5 mg soluble protein per liter of culture. Importantly, it has been found that the polypeptides can be expressed, for example, in E. coli in an active form, because the N-terminal methionine encoded by the start codon is removed in this expression system so as to produce the polypeptide with transpeptidase activity as provided herein.

[0046] Accordingly, the transpeptidases of the invention have the advantage of being specific for a recognition sequence motif and having a high reaction rate. This allows specific peptide and protein ligations at high reaction rates also in presence of low substrate peptide/protein levels in vitro and/or in vivo.

[0047] As mentioned above, according to a first aspect, the present invention relates to a polypeptide comprising an N-terminal DUF2121 domain having an N-terminal serine or threonine residue. The polypeptide of the invention has transpeptidase activity, preferably sequence-specific transpeptidase activity.

[0048] As used herein “N-terminal DUF2121 domain” means that the amino acid sequence of the DUF2121 domain forms the N-terminus of the polypeptide. In other words the first amino acid of the DUF2121 domain, which in context of the invention is a threonine or a serine residue, forms the N-terminus with a free amino-group (N-terminus of the polypeptide).

[0049] As used herein “N-terminal serine or threonine residue” means that a serine or threonine residue forms the N-terminus of a DUF2121 domain. In other words the first amino acid of DUF2121 domain is a serine or threonine residue. Preferably, said serine or threonine residue also forms the N-terminus of the polypeptide comprising the DUF2121 domain with a free amino group.

[0050] Note that also preparations of polypeptides of the present invention having additional amino acid residues N-terminally of the catalytic serine or threonine residue of the DUF2121 domain can have transpeptidase activity. As shown in appended Example 13 said preparations may contain a fraction of truncated polypeptides with N-terminal catalytic serine/threonine residue.

[0051] A “transpeptidase”, as used herein, is an enzyme or a catalytic domain of an enzyme or a polypeptide that is able to catalyze the breakage of one or more peptide bonds and subsequently the formation of one or more novel peptide bonds. By this activity novel peptide bonds can be formed between two originally not connected polypeptides or fragments thereof, i.e. two polypeptides or fragments thereof can be “ligated” in a posttranslational manner. Due to the formation of a new peptide bond by the transpeptidase, the polypeptides of the invention may also be referred to as “protein ligases” or “peptide ligases”.

[0052] As used herein, the term “sequence-specific transpeptidase” defines a transpeptidase which requires the substrate peptides or proteins to comprise a recognition sequence to act on the substrates as transpeptidase. The DUF2121 domain-containing transpeptidase of the invention recognizes its substrates via an amino acid sequence motif referred to as “DUF2121 recognition motif” or “DUF2121 recognition sequence” herein. As demonstrated in the appended examples and as described in detail below one of two substrate polypeptides may only comprise the C-terminal portion of the DUF2121 recognition motif What is understood under C-terminal portion is specified herein below. The DUF2121 recognition sequence may be positioned N-terminally, internally or C-terminally in a substrate protein. In substrate proteins comprising only the C-terminal portion of the DUF2121 recognition sequence, the C-terminal portion of the DUF2121 recognition motif must be positioned at the N-terminus. In principle, it is also possible that a substrate protein comprises two or more DUF2121 recognition motifs. In this event multiple transpeptidase reactions linking different parts of polypeptides are generated.

[0053] If the polypeptide of the invention acts on two substrate proteins comprising the DUF2121 recognition motif internally, the transpeptidase activity leads to an exchange of protein portions between the two substrate proteins. Specifically, the N-terminal portion of the first substrate protein and the C-terminal portion of the second substrate protein are ligated. In the same reaction also the N-terminal portion of the second substrate protein may be ligated with the C-terminal portion of the first substrate protein. Due to this capability to replace portions of a substrate protein, the polypeptide of the invention may also be referred to as “peptide recombinase”. The term “peptide recombinase”, as used herein, means that a fragment of a first substrate polypeptide is replaced by a portion of a second substrate polypeptide. A recombination reaction furthermore encompasses the capability to replace a portion of a first substrate polypeptide with the entire sequence of a second substrate polypeptide.

[0054] The polypeptide of the invention provided herein has a DUF2121 domain at its N-terminus with an N-terminal serine or threonine. DUF2121 domains are known in the art and annotated in databases (see Pfam: PF09894; InterPro: IPR016754). Thus, amino acid sequences of annotated DUF2121 domains are readily derivable from these databases. Moreover, DUF2121 sequences are enclosed herein. Based on sequence alignments of these amino acid sequences also the conserved catalytic threonine or serine residue now found herein to form the N-terminal amino acid in the active form of DUF2121 can be identified with routine measures, i.e. amino acid sequence alignments. The threonine and serine residue which corresponds to the amino acid in position 1 of SEQ ID NOs: 4 to 143, forms the N-terminal amino acid residue of the polypeptide of the invention. In the annotated DUF2121 sequences, which typically also comprise the N-terminal methionine encoded by the ATG start codon, this serine/threonine residue is in most of the annotated sequences (more than 50%) found in position 2 of the annotated sequences. Only in some of the annotated sequences the serine and threonine residue is not found in position 2 but further downstream behind another methionine residue (as it becomes apparent from an alignment with all annotated DUF2121 domains). In these sequences the start codon is most likely misannotated in the database and the actual amino acid sequence starts with the methionine before the conserved threonine and serine residue. However, a skilled person can identify using routine sequence alignment method, e.g. as described herein below, to identify the serine or threonine residue corresponding to position two of the majority of the annotated DUF2121 sequences and to the active site. Based on the already annotated DUF2121 domains a skilled person can also identify DUF2121 domains in not yet annotated sequences with routine methods, such as sequence alignments and BLAST analysis, preferably as mentioned herein below. To identify potential DUF2121 domains the skilled person can run a protein BLAST search against the non-redundant protein sequence database, using default parameters and the DUF2121 consensus (SEQ ID NO: 2) as query sequence. When used in context of the present invention the default parameters were: Max target sequences: 500/Expect threshold: 10/Word size: 6/Max matches in a query range: 0/Scoring Matrix: BLOSUM62/Gap Costs: Existence: 11 Extension: 1/Conditional compositional score matrix adjustment/No filters or masking. The skilled artisan may adopt these parameters for his/her purposes. But standards, values, parameters provided herein were established using these parameters and may be considered as reference.

[0055] An e-value of the Blast alignment of 1×10⁻¹⁰ or less indicates that the sequence of interest is with high likelihood a DUF2121 domain. Exemplary and preferred DUF2121 domains are disclosed herein below.

[0056] In order to determine whether a nucleotide residue/position or an amino acid residue/position in a given nucleotide sequence or amino acid sequence, respectively, corresponds to a certain position compared to another nucleotide sequence or amino acid sequence, respectively, the skilled person can use means and methods well known in the art, e.g., alignments, either manually or by using computer programs such as those mentioned herein. For example, BLAST 2.0 can be used to search for local sequence alignments. BLAST or BLAST 2.0, as discussed above, produces alignments of nucleotide or protein sequences to determine sequence similarity. Because of the local nature of the alignments, BLAST or BLAST 2.0 is especially useful in determining exact matches or in identifying similar or identical sequences. Similarly, alignments may also be based on the CLUSTALW computer program (Thompson (1994) Nucl. Acids Res. 2:4673-4680) or CLUSTAL Omega (Sievers (2014) Curr. Protoc. Bioinformatics 48:3.13.1-3.13.16).

[0057] Using these methods a skilled person is readily in the position to identify the serine or threonine residue corresponding to the serine or threonine residue forming the N-terminal amino acid in position 1 of any one of the DUF2121 sequences depicted in SEQ ID NOs: 4 to 143.

[0058] As mentioned above, the DUF2121 domain as comprised in the polypeptide of the invention is characterized in that it has sequence-specific transpeptidase activity. The sequence specific transpeptidase activity of a DUF2121 domain or DUF2121 domain containing protein provided herein can be assessed with routine assays as defined herein and used in the appended Examples. Such transpeptidase assays may involve the provision of two substrate proteins comprising a DUF2121 recognition motif and bringing the same into contact with the polypeptide to be tested for transpeptidase activity. The DUF2121 recognition motif may be the same or different in the two substrates. Preferably, the same DUF2121 recognition motif is employed in both substrates. The DUF2121 recognition motif may be positioned anywhere in the two substrate proteins (e.g. internally, N-terminal or C-terminal). In an embodiment the assay for testing transpeptidase activity may be performed in (several) parallel reactions, each of the reactions using a different pair of substrates, wherein the two substrates of a pair comprise the same DUF2121 recognition sequences, and wherein the substrate pairs of the different reactions have different DUF2121 recognition motifs. The number of different DUF2121 recognition sequences and substrate pairs employed in these testings/assays for transpeptidase activity may be varied. A DUF2121 domain is found to have transpeptidase activity in the event that transpeptidase activity is measured with the read out used for at least one of the tested substrate pairs. In an illustrative assay at least 5 different substrate pairs may be tested. It is also envisaged that, at least 10, at least 15, at least 20, at least 25, at least 30, at least 35, at least, 40, at least 45, at least 50, at least 55, at least 60, at least 65, at least 70, at least 75, at least 80, at least 85, at least 90, at least 95 or at least 100 substrate pairs may be tested. Herein provided and exemplified are 214 DUF2121 recognition motifs. Said recognition motifs are depicted in SEQ ID NOs: 315-366, 460-510 and 551-661. Accordingly, said at least 100 substrate pairs, for example the 103 or 214 substrate pairs comprising the DUF2121 recognition motifs as provided in context of the invention and its priorities may be analyzed. Said substrate pairs may comprise one of the DUF2121 recognition motifs depicted in SEQ ID NOs: 315-366, 460-510 and 551-661, wherein every substrate pair comprises a different DUF2121 recognition motif and wherein within a substrate pair the same DUF2121 recognition motif is used. In other words, a test for sequence-specific transpeptidase activity according to the invention may involve the assessment whether a polypeptide acts as a transpeptidase on any one of the DUF2121 recognition motifs depicted in SEQ ID NOs: 315-366, 460-510 and 551-661. A tested polypeptide is considered as a sequence-specific transpeptidase according to the invention, if at least for one of the tested substrate pairs/DUF2121 recognition motifs transpeptidase activity can be measured. The measurement of the transpeptidase activity can be directly or indirectly. “Direct” measurement means that the newly generated fusion protein resulting from the transpeptidase reaction is detected (e.g. by SDS-PAGE and/or size exclusion chromatography and/or mass spectrometry). “Indirect” measurement means that a side product, e.g. an amino acid fragment released by the transpeptidase reaction (e.g., a labeled amino acid fragment released by the transpeptidase reaction) is detected. In other words, a tested polypeptide acts as a sequence-specific transpeptidase according to the invention if the polypeptide shows at least transpeptidase activity according to the read-out of the detection method used for at least one of the DUF2121 recognition motifs as depicted in SEQ ID NOs: 315-366, 460-510 and 551-661. The DUF2121 recognition motifs are sequences derived from MtrA protein sequences of DUF2121 domain expressing organisms. Table 1 shows the origin of the DUF2121 recognition motifs and the growth conditions for the corresponding organisms. Suitable detection methods are described herein below and the appended Examples.

[0059] The substrate protein pairs used in the assay can in principle be any proteins as long as the selection of proteins allows for a read out of the transpeptidase reaction.

[0060] One read out to measure transpeptidase activity of a polypeptide when brought into contact with a substrate polypeptide pair is SDS-PAGE. When using this read out, the substrate protein molecular weights and the position of the DUF2121 recognition motif therein (which determines the weight of the N-terminal and C-terminal portion) need to be selected such that at least one of the chimeric substrate proteins resulting from DUF2121 transpeptidase activity (i.e. fusion of N-terminal portion of first substrate protein and C-terminal portion of second substrate protein and vice versa) can be distinguished in its SDS-PAGE migration behavior from the two substrate proteins. This difference in migration behavior allows detecting the production of a chimeric substrate protein by sequence-specific transpeptidase reaction by detecting a band in the SDS-PAGE corresponding to the migration behavior of the formed chimeric substrate protein. SDS-PAGE analysis is a routine method known in the art. A skilled person can define the SDS gel to be used and the buffers to be used depending on the molecular weight of the protein fragments to be analyzed. Instead of SDS PAGE also LCMS (Liquid Chromatography-Mass Specotroscopy) may be used as read out, e.g., as described in the following and the appended Examples.

[0061] Accordingly, to test for the sequence-specific transpeptidase activity of a DUF2121 domain one may incubate the polypeptide to be tested for enzymatic activity (e.g. 0.5 g/l) with a first substrate protein comprising a DUF2121 recognition and a second substrate protein (e.g. 0.5 g/l) comprising a DUF2121 recognition motif, e.g. the same as the first substrate protein). The second substrate protein is preferably different from the first substrate protein. For instance, the first substrate protein may be based on a MtrA fragment comprising the DUF2121 recognition sequence (e.g. SEQ ID NO:420) and the second substrate protein is based on an artificial ubiquitin with a DUF2121 recognition motif C-terminally fused thereto (e.g. SEQ ID NO:392). The mixture may be incubated over night (e.g. at room temperature) in 20 mM HEPES-NaOH pH 7.5, 100 mM NaCl, 50 mM KCl, 0.5 mM TCEP. Subsequently, samples can then be analyzed by SDS-PAGE. Alternatively, or additionally samples may be desalted and subjected to a Phenomenex Aeris Widepore 3.6 μm C4 200 Å (100×2.1 mm) column, eluted with a 30-80% H2O/acetonitrile gradient over 15 min in the presence of 0.05% trifluoroacetic acid and analyzed with a Bruker Daltonik microTOF. Data processing may be performed with Bruker Compass DataAnalysis 4.2 and the m/z deconvoluted with the MaxEnt module to obtain the protein mass. The relevant read out in both read out methods is whether the chimeric polypeptide expected as product of the transpeptidase activity is formed.

[0062] Very similar the skilled person is also able to identify additional DUF2121 recognition sequences. Based on the already identified DUF2121 recognition motifs a skilled person can also identify DUF2121 recognition sequences in not yet annotated sequences with routine methods, such as sequence alignments and protein BLAST analysis, preferably as mentioned herein. The protein BLAST search may be performed using default parameters and the consensus DUF2121 recognition motif (SEQ ID NO: 366) as a query sequence. When used in context of the present invention the default parameters were: Max target sequences: 500/Expect threshold: 100/Word size: 2/Max matches in a query range: 0/Scoring Matrix: PAM30/Gap Costs: Existence: 9 Extension: 1/No compositional score matrix adjustment/No filters or masking, see in this context also the comments herein above. An e-value of 1 or less indicates that the sequence of interest is with high likelihood a DUF2121 recognition motif.

[0063] To assess whether a given sequence is a DUF2121 recognition motif, routine assays as defined herein and used in the appended Examples may be performed. These assays may involve the provision of two substrate polypeptides comprising the sequence to be tested, i.e. the potential DUF2121 recognition motif and bringing the same into contact with a DUF2121 domain containing polypeptide having transpeptidase activity as described herein. The potential DUF2121 recognition motif may be positioned at any sterically accessible position within the two substrate proteins (e.g. internally, N-terminal or C-terminal). The skilled person is able to identify sterically accessible positions in a substrate through structure prediction tools, such as HHPred. In an embodiment the assay for identifying a DUF2121 recognition motif is performed in (several) parallel reactions, each of the reactions using the two substrate polypeptides comprising the sequence to be tested and each of the reaction using different polypeptides having transpeptidase activity as described herein. The number of different DUF2121 domain containing polypeptides having transpeptidase activity employed may be varied. A certain sequence is found to be (or determined as) a DUF2121 recognition sequence in the event that transpeptidase activity is measured with the read out used for at least one of the DUF2121 containing polypeptides.

[0064] In an illustrative assay for identifying a DUF2121 recognition motif at least 5 different reactions may be tested. It is also envisaged that at least 10, at least 15, at least 20, at least 25, at least 30, at least 35, at least, 40, at least 45, at least 50, at least 55, at least 60, at least 65, at least 70, at least 75, at least 80, at least 85, at least 90, at least 95, at least 100, at least 110, at least 120, at least 130, at least 140, at least 150, at least 160, at least 170, at least 180, at least 190 or at least 200 reactions may bet tested. Herein provided and exemplified are 222 DUF2121 domain containing polypeptides. Said DUF2121 domain containing polypeptides are depicted in SEQ ID NOs: 4-225.

[0065] Accordingly, said at least 200 reaction, for example 222 reactions comprising the DUF2121 domain containing polypeptides as provided in context of the invention may be analyzed. The reactions may comprise one of the DUF2121 domain containing polypeptides depicted in SEQ ID NOs: 4-225, wherein every reaction comprises a different DUF2121 domain containing polypeptide and the two substrate polypeptides comprising the sequence to be tested. In other words, a test whether a sequence is a DUF2121 recognition motif according to the invention may involve the assessment whether a DUF2121 domain containing polypeptide depicted in SEQ ID NOs: 4-225 acts as a transpeptidase on the two substrate polypeptides containing the sequence to be tested. A tested sequence is considered to be a DUF2121 recognition motif according to the invention, if at least one of the DUF2121 domain containing polypeptides acts as a transpeptidase on the two substrate polypeptides comprising the sequence to be tested. The DUF2121 domain containing polypeptides that might be used for said test reactions were identified in different microorganisms. Table 1 depicts the corresponding microorganisms and the corresponding growth conditions. The skilled person is well aware that the required reaction conditions for the DUF2121 containing polypeptide to show transpeptidase activity may be not identical for different DUF2121 containing polypeptides. Accordingly, the skilled person knows how to adjust reaction parameters such as temperature, salt concentration, pH etc. to test for maximal transpeptidase activity of the DUF2121 containing polypeptide. The skilled person is also aware that the reaction condition required by the DUF2121 containing polypeptide may resemble the growth condition of the microorganism where said DUF2121 containing polypeptide is derived from. However, it is evident for the skilled person that a transpeptidase of the present invention may also work well at conditions different from the growth conditions of the corresponding organism. It is evident for the skilled person that a transpeptidase of the present invention may work well at temperatures lower (or higher) than the optimal growth temperature of the organism said transpeptidase is derived from. Accordingly, a transpeptidase of the present invention may be isolated from a hyperthermophilic organism but may work well at ambient temperatures or physiologic temperatures of mesophilic organisms (e.g. 25° C. or 37° C.). Also, a transpeptidase of the present invention may be isolated from a thermophilic organism but may work well at ambient temperatures or physiologic temperatures of mesophilic organisms (e.g. 25° C. or 37° C.). Accordingly, said transpeptidases of the present invention may be used at 10° C. to 40° C. and all digits inbetween, such as 15° C., 20° C., 25° C., 30° C., 35° C. or 37° C. Accordingly, in the appended Examples it is shown that Adriase of M. mazei works well at about 37° C.

[0066] Although evident for the skilled person it is pointed out that not for all DUF2121 recognition motifs depicted in SEQ ID NOs: 315-366, 460-510 and 551-661 transpeptidase activity may be measured when contacted with any polypeptide of the invention. Transpeptidase activity may only be measured when certain DUF2121 recognition motifs are contacted with certain polypeptides of the invention. Transpeptidase activity may be measured when a DUF2121 recognition motifs of a certain species will be contacted with the DUF2121 domain of the same species or a polypeptide comprising the DUF2121 domain of the same species. It is also evident for the skilled artisan that the length of a DUF2121 recognition motif may be optimized. The skilled artisan may apply the assays described herein to identify a certain combination of (a) DUF2121 domain(s) and (a) DUF2121 recognition motif(s) as, inter alia, depicted in SEQ ID NOs: 315-366, 460-510 and 551-661, wherein said combination exhibits transpeptidase activity. To optimize the DUF2121 recognition motif the skilled person may subject several variants of the DUF2121 recognition motif to the transpeptidase assay, wherein the variants may be characterized that one or more amino acid residues starting from the N-terminus of the motif and/or starting from the C-terminus of the motif are removed. The DUF2121 recognition motif variant that leads to the highest transpeptidase activity in a corresponding assay may be used for subsequent applications. It is also possible to optimize the DUF2121 recognition motifs by substituting one or more amino acids of the motif by other amino acids. The amino acid substitution may be conservative or non-conservative. “Conservative amino acid substitution” as used herein means that the amino acid is substituted by an amino acid of similar chemical properties. “Non-conservative amino acid substitution” as used herein means that the amino acid is substituted by an amino acid of different chemical properties. Preferably, the amino acid residues in the X₁DPX₂A sequence motif as described above in the DUF2121 recognition motif is not substituted.

[0067] Without being bound by theory it is envisaged that the “amino acid environment” of the DUF2121 recognition motif may have influence on the effectivity of the DUF2121 recognition motif. Pronounced and/or transpeptidase activity may be observed when a certain DUF2121 recognition motif embedded in a certain polypeptide or used isolated is contacted with a certain DUF2121 domain. However, no transpeptidase activity or a reduced transpeptidase activity may be observed when the same DUF2121 recognition motif is contacted with the same DUF2121 domain but wherein the DUF2121 recognition motif is embedded in a different polypeptide. In other words, the amino acid residues N-terminally and/or C-terminally of the DUF2121 recognition motif may have influence on the transpeptidase activity observed when said DUF2121 recognition motif is contacted with a DUF2121 domain. Without being bound by theory it is also envisaged that sterically more demanding substrates for the transpeptidase reaction require elongated DUF2121 recognition motifs. For the DUF2121 recognition motif from M. mazei for example it is demonstrated in the appended examples that (5)KDPGA(10) (the number in brackets denote the number of amino acids N-terminally and C-terminally of the KDPGA motif) may be a useful DUF2121 recognition motif for sterically accessible substrates, such as peptides, and that sterically more demanding protein-protein ligations are catalyzed most efficiently via the (5)KDPGA(15) motif. However, it is pointed out that this observation may not be true for DUF2121 recognition motifs of other organisms.

[0068] The measurement of the transpeptidase activity can be directly or indirectly. “Direct” measurement means that the newly generated fusion protein resulting from the transpeptidase reaction is detected (e.g. by SDS PAGE and/or size exclusion chromatography and/or mass spectrometry). “Indirect” measurement means that a side product, e.g. an amino acid fragment released by the transpeptidase reaction (e.g., a labeled amino acid fragment released by the transpeptidase reaction) is detected. In other words, a tested sequence is a DUF2121 recognition motif according to the invention if at least one DUF2121 containing polypeptide depicted in SEQ ID NOs: 4-225 acts as a transpeptidase on the two substrate polypeptides comprising the sequence to be tested according to the read-out of the detection method used. Suitable detection methods are described herein below and the appended Examples.

[0069] The substrate polypeptides comprising the sequence to be tested used in the assay described above can in principle be any polypeptides as long as the selection of proteins allows for a read out of the transpeptidase reaction.

[0070] One read out to measure transpeptidase activity of a polypeptide when brought into contact with a substrate polypeptide pair is SDS-PAGE. When using this read out, the substrate polypeptide molecular weights and the position of the sequence to be tested, i.e. the potential DUF2121 recognition motif therein (which determines the weight of the N-terminal and C-terminal portion) need to be selected such that at least one of the chimeric substrate proteins resulting from DUF2121 transpeptidase activity (i.e. fusion of N-terminal portion of first substrate protein and C-terminal portion of second substrate protein and vice versa) can be distinguished in its migration behavior from the two substrate proteins. This difference in migration behavior allows detecting the production of a chimeric substrate protein by sequence-specific transpeptidase reaction by detecting a band in the SDS PAGE corresponding to the migration behavior of the formed chimeric substrate protein. SDS PAGE analysis is a routine method known in the art. A skilled person can define the SDS gel to be used and the buffers to be used depending on the molecular weight of the protein fragments to be analyzed. Instead of SDS PAGE also LCMS may be used as read out, e.g., as described in the appended Examples.

[0071] Accordingly, to test for whether a given sequence is a DUF2121 recognition motif one may incubate the first substrate polypeptide comprising the sequence to be tested (e.g. 0.5 g/l) and a second substrate polypeptide comprising the sequence to be tested (e.g. 0.5 g/l) with a DUF2121 domain containing polypeptide (e.g. 0.5 g/l), preferable a polypeptide as depicted in SEQ ID NOs: 4-225. The mixture may be incubated over night (e.g. at room temperature) in 20 mM HEPES-NaOH pH 7.5, 100 mM NaCl, 50 mM KCl, 0.5 mM TCEP. Subsequently, samples may be desalted. These samples can then be analyzed by SDS-PAGE. Alternatively, or additionally desalted samples may be subjected to a Phenomenex Aeris Widepore 3.6 μm C4 200 Å (100×2.1 mm) column, eluted with a 30-80% H2O/acetonitrile gradient over 15 min in the presence of 0.05% trifluoroacetic acid and analyzed with a Bruker Daltonik microTOF. Data processing may be performed with Bruker Compass DataAnalysis 4.2 and the m/z deconvoluted with the MaxEnt module to obtain the protein mass. The relevant read out in both read out methods is whether the chimeric polypeptide expected as product of the transpeptidase activity is formed. Although obvious for the skilled person and mentioned herein above it is again pointed out that the substrate polypeptides have to be chosen that a read out of transpeptidase reaction is possible, e.g. that the molecular weight of the fusion polypeptide is different from the molecular weight of the substrate polypeptides.

[0072] In principle, in the polypeptide of the invention any DUF2121 domain can be employed as long as it has the conserved serine or threonine residue (corresponding to position 2 of the correctly annotated DUF2121 sequence) at its N-terminus and has transpeptidase activity. In a preferred embodiment the polypeptide of the invention comprises a DUF2121 domain that has the amino acid sequence as depicted in SEQ ID NO: 2 or an amino acid sequence having at least 20%, preferably at least 25%, even more preferably at least 30%, even more preferably at least 30%, even more preferably at least 40%, even more preferably at least 50%, even more preferably at least 60%, even more preferably at least 70%, even more preferably at least 80%, even more preferably at least 90%, even more preferably at least 95%, even more preferably at least 98% and most preferably at least 99% sequence identity thereto and having sequence-specific transpeptidase activity according to the invention. The amino acid sequence depicted in SEQ ID NO: 2 is a consensus sequence prepared based on SEQ IDs NO: 4-143. These sequences were aligned with MUSCLE (https://toolkit.tuebingen.mpg.de/tools/muscle; 1 iteration) and filtered for a maximum sequence identity of 60% using Hhfilter (https://toolkit.tuebingen.mpg.de/tools/hhfilter). The resulting alignment of the remaining sequences (SEQ IDs NO: 4-7, 10, 14, 19, 22, 30, 31, 33, 39, 43, 53, 61, 69, 72, 73, 78, 86, 87, 92, 93, 96-99, 115, 126, 135, 140, 141 and 143) was then used to create said consensus sequence with the advanced consensus maker tool (https://www.hiv.lanl.gov/content/sequence/CONSENSUS/AdvCon.html; consensus is always the most common letter setting). The consensus sequence preferably shares a sequence identity of at least 25%, preferably at least 30% and most preferably at least 35% identity with DUF2121 domain sequences. The appended Examples demonstrate that the DUF2121 domains of Methanosarcina mazei (SEQ ID NO: 106) and Methanocaldococcus jannaschii (SEQ ID NO: 17) have sequence specific transpeptidase activity according to the invention if expressed so as to have an N-terminal threonine or serine residue.

[0073] Again it has to be pointed out that also preparations of the polypeptide of the present invention with amino acid residues N-terminally of the catalytic serine or threonine residue can exhibit transpeptidase activity. As demonstrated in the appended Examples such preparations may contain truncated variants of the polypeptide exposing the catalytic serine or threonine at the N-terminus leading to transpeptidase activity. Accordingly, the invention also relates to a polypeptide having transpeptidase activity as described herein above wherein said polypeptide may further comprise at least one additional amino acid residue N-terminally of the catalytical serine or threonine residue.

[0074] Furthermore, the N-terminal serine/threonine residue corresponding to position 1 of SEQ ID NO: 2 has been identified as crucial for the transpeptidase activity and defines the catalytically active form of a DUF2121 domain. Further, it has been found that deletion of the positions of the DUF2121 corresponding to positions 28 to 57 of the DUF2121 consensus sequence of SEQ ID NO: 2 in DUF2121 domains interferes with transpeptidase activity. Without being bound by theory, these residues that are present in the DUF2121 domain comprised in the polypeptide of the invention may also be involved in maintaining DUF2121 sequence-specific transpeptidase activity. Accordingly, the polypeptide of the invention may comprise an N-terminal DUF2121 domain that has an N-terminal serine or threonine residue and an amino acid sequence as defined by positions 28 to 57 of SEQ ID NO: 2, the amino acid sequence fragment of any one of SEQ ID NOs: 4 to 143 corresponding in an alignment to positions 28 to 57 of SEQ ID NO: 2, or a sequence having at least 30%, preferably at least 60% and most preferably at least 90% sequence identity to positions 28 to 57 of SEQ ID NO: 2 or the corresponding fragments of any one of SEQ ID NOs: 4 to 143.

[0075] In a preferred embodiment, the polypeptide of the invention comprises or consists of a DUF2121 domain having an amino acid sequence selected from the group consisting of SEQ ID NOs: 4 to 143 or an amino acid sequence having at least 20%, preferably at least 30%, even more preferably at least 40%, even more preferably at least 50%, even more preferably at least 60%, even more preferably at least 70%, even more preferably at least 80%, even more preferably at least 90%, even more preferably at least 95% and most preferably at least 99% sequence identity to said amino acid sequence and having transpeptidase activity according to the invention. In a particularly preferred embodiment the polypeptide of the invention may comprise or consist of a DUF2121 domain having an amino acid sequence selected from the group consisting of SEQ ID NOs: 4 to 143 and having sequence-specific transpeptidase activity according to the invention. In one embodiment, the polypeptide of the invention may comprise or consist of a DUF2121 domain having an amino acid sequence selected from the group consisting of SEQ ID NOs: 4 to 85 or an amino acid sequence having at least 20%, preferably at least 30%, preferably at least 40%, even more preferably at least 50%, even more preferably at least 60%, even more preferably at least 70%, even more preferably at least 80%, even more preferably at least 90%, even more preferably at least 95% and most preferably at least 99% sequence identity to said amino acid sequence and having sequence specific transpeptidase activity according to the invention. The DUF2121 sequences depicted in SEQ ID NOs: 4 to 85 correspond to DUF2121 domains annotated in the PFAM database, yet differ from the database entries in that they lack the N-terminal methionine removal of which is required for transpeptidase activity. The DUF2121 domains of SEQ ID NOs: 4 to 85 form part of DUF2121 domain-containing proteins comprising additional protein sequences and domains. As demonstrated throughout the appended examples also shortened version of said DUF2121 domain-containing proteins show transpeptidase activity as long as they comprise the N-terminal DUF2121 domain (see e.g. Example 8). The corresponding fulllength proteins are depicted in SEQ ID NOs: 144 to 225. The protein sequences comprised in the DUF2121 domain containing proteins of SEQ ID Nos: 144 to 225 include an additional OB-domain like fold as identified from the structure of a DUF2121 domain-containing protein solved in the appended examples (see FIG. 6). The OB-like domains in these DUF2121 domain-containing proteins are not mandatory for DUF2121 transpeptidase activity as demonstrated in the appended examples. However, their presence may facilitate substrate binding and thus the transpeptidase reaction. In another aspect, the polypeptide of the invention comprises or consists of a DUF2121 domain having an amino acid sequence selected from the group consisting of SEQ ID NOs: 86 to 143 or an amino acid sequence having at least 20%, even more preferably at least 30%, preferably at least 40%, even more preferably at least 50%, even more preferably at least 60%, even more preferably at least 70%, even more preferably at least 80%, even more preferably at least 90%, even more preferably at least 95% and most preferably at least 99% sequence identity to said amino acid sequence and having sequence-specific transpeptidase activity according to the invention. The DUF2121 domains annotated in SEQ ID NOs: 86 to 143 are annotated in the PFAM database, yet with an additional N-terminal methionine. The DUF2121 domains of SEQ ID NOs: 86 to 143 represent the entire amino acid sequences of the annotated proteins, i.e. these proteins lack further protein domains.

[0076] In a preferred embodiment of the invention, the DUF2121 domain of the polypeptide of the invention may consist of an amino acid sequence selected from SEQ ID NOs: 17 and 106 or an amino acid sequence having at least 20%, even more preferably at least 30%, preferably at least 40%, even more preferably at least 50%, even more preferably at least 60%, even more preferably at least 70%, even more preferably at least 80%, even more preferably at least 90%, even more preferably at least 95% and most preferably at least 99% sequence identity to said amino acid sequence and having sequence-specific transpeptidase activity according to the invention. In one embodiment the DUF2121 domain of the polypeptide of the invention may consist of an amino acid sequence selected from SEQ ID NOs: 17 and 106.

[0077] Preferably, the polypeptide of the invention may comprise an amino acid sequence selected from the group consisting of SEQ ID NOs: 86 to 225 or an amino acid sequence having at least 20%, preferably at least 30%, preferably at least 40%, even more preferably at least 50%, even more preferably at least 60%, even more preferably at least 70%, even more preferably at least 80%, even more preferably at least 90%, even more preferably at least 95% and most preferably at least 99% sequence identity to said amino acid sequence and has a sequence specific transpeptidase activity according to the invention. More preferably, the polypeptide of the invention may consist of an amino acid sequence selected from the group consisting of SEQ ID NOs: 86 to 225 or an amino acid sequence having at least 20%, preferably at least 30%, preferably at least 40%, even more preferably at least 50%, even more preferably at least 60%, even more preferably at least 70%, even more preferably at least 80%, even more preferably at least 90%, even more preferably at least 95% and most preferably at least 99% sequence identity to said amino acid sequence and has a sequence specific transpeptidase activity according to the invention. Additionally, the polypeptide of the invention may comprise or consist of an amino acid sequence selected from the group consisting of SEQ ID NOs: 86 to 143 or an amino acid sequence having at least 20%, preferably at least 30%, preferably at least 40%, even more preferably at least 50%, even more preferably at least 60%, even more preferably at least 70%, even more preferably at least 80%, even more preferably at least 90%, even more preferably at least 95% and most preferably at least 99% sequence identity to said amino acid sequence and has transpeptidase activity according to the invention. The polypeptide of the invention may also comprise or consist of an amino acid sequence selected from the group consisting of SEQ ID NOs: 144 to 225 or an amino acid sequence having at least 20%, preferably at least 30%, preferably at least 40%, even more preferably at least 50%, even more preferably at least 60%, even more preferably at least 70%, even more preferably at least 80%, even more preferably at least 90%, even more preferably at least 95% and most preferably at least 99% sequence identity to said amino acid sequence and has a sequence specific transpeptidase activity according to the invention.

[0078] In a preferred embodiment of the invention, the polypeptide of the invention may comprise an amino acid sequence selected from the group consisting of an amino acid sequence selected from SEQ ID NOs: 106 and 159 or an amino acid sequence having at least 20%, even more preferably at least 30%, preferably at least 40%, even more preferably at least 50%, even more preferably at least 60%, even more preferably at least 70%, even more preferably at least 80%, even more preferably at least 90%, even more preferably at least 95% and most preferably at least 99% sequence identity to said amino acid sequence and having sequence-specific transpeptidase activity according to the invention. In one embodiment the DUF2121 domain of the polypeptide of the invention may comprise the amino acid sequence selected from SEQ ID NOs: 17 and 106. In a particularly preferred embodiment of the invention, the polypeptide of the invention may consist of an amino acid sequence selected from the group consisting of an amino acid sequence selected from SEQ ID NOs: 106 and 159 or an amino acid sequence having at least 20%, even more preferably at least 30%, preferably at least 40%, even more preferably at least 50%, even more preferably at least 60%, even more preferably at least 70%, even more preferably at least 80%, even more preferably at least 90%, even more preferably at least 95% and most preferably at least 99% sequence identity to said amino acid sequence and having sequence-specific transpeptidase activity according to the invention. The DUF2121 domain of the polypeptide of the invention may consist of the amino acid sequence selected from SEQ ID NOs: 17 and 106.

[0079] The polypeptide of the invention may optionally comprise an OB-like domain, preferably C-terminally of the DUF2121 domain. An “OB-like domain” in the context of the invention relates to an amino acid sequence having a fold similar to the GB-fold. Preferably, an OB-like domain in the context of the invention has an amino acid sequence selected from the group consisting of SEQ ID NOs: 1 and 226 to 307 or an amino acid sequence having at least 60% sequence identity, preferably at least 70%, even more preferably at least 80%, even more preferably at least 90%, even more preferably at least 95% and most preferably at least 99% sequence identity to said amino acid sequence. SEQ ID NO: 1 corresponds to an OB-like consensus sequence based on SEQ IDs NO: 226-307. These sequences were aligned with MUSCLE (https://toolkit.tuebingen.mpg.de/tools/muscle; 3 iterations) and filtered for a maximum sequence identity of 60% using Hhfilter (https://toolkit.tuebingen.mpg.de/tools/hhfilter). The resulting alignment of the remaining sequences was then used to create said consensus sequence with the advanced consensus maker tool (https://www.hiv.lanl.gov/content/sequence/CONSENSUS/AdvCon.html; consensus is always the most common letter setting). The SEQ ID NOs: 226 to 307 represent the OB-like domains of the DUF2121 domain containing proteins annotated in the PFAM database. As shown in the appended Examples an OB-like domain is not required for the DUF2121 sequence specific transpeptidase activity. However, the presence of the OB-like domain may facilitate catalytic activity as transpeptidase. Without being bound by theory, the structural data presented in the appended Examples suggests that the OB-like domain promotes substrate binding. In a preferred embodiment the polypeptide of the invention may comprise an N-terminal DUF2121 domain consisting of an amino acid sequence selected from the group consisting of SEQ ID NOs: 4 to 85 and further comprises an OB-like domain, preferably an OB-like domain consisting of an amino acid sequence selected from the group consisting of SEQ ID NOs 226 to 307 or an amino acid sequence having at least 60% sequence identity, preferably at least 70%, even more preferably at least 80%, even more preferably at least 90%, even more preferably at least 95% and most preferably at least 99% sequence identity to said amino acid sequence. The OB-like domain is positioned more C-terminally in the polypeptide of the invention, preferably directly C-terminally of the DUF2121 domain. Particularly preferred is a polypeptide of the invention consisting of a DUF2121 domain and a OB-like domain C-terminally, preferably directly C-terminal thereof, wherein the OB-like domain consists of an amino acid sequence selected from the group consisting of SEQ ID NOs: 1 and 226 to 307 or an amino acid sequence having at least 60% sequence identity, preferably at least 70%, even more preferably at least 80%, even more preferably at least 90%, even more preferably at least 95% and most preferably at least 99% sequence identity to said amino acid sequence. Even more preferably the OB-like domain consists of an amino acid sequence selected from the group consisting of SEQ ID NOs: 1 and 226 to 307.

[0080] SEQ ID NO: 3 represents an artificial polypeptide, wherein the consensus sequence of an GB-like domain is C-terminally fused to the consensus sequence of the DUF2121 domain. Accordingly, the polypeptide of the invention may comprise an amino acid sequence as depicted in SEQ ID NO: 3 or an amino acid sequence having at least 20%, even more preferably at least 30%, preferably at least 40%, even more preferably at least 50%, even more preferably at least 60%, even more preferably at least 70%, even more preferably at least 80%, even more preferably at least 90%, even more preferably at least 95% and most preferably at least 99% sequence identity to said amino acid sequence and having sequence-specific transpeptidase activity according to the invention.

[0081] The polypeptide of the invention, the DUF2121 domain comprised therein or other domains or amino acid sequence stretches comprised therein are defined by sequence identity to a certain amino acid sequence in some embodiments. Those having skill in the art will know how to determine percent identity between/among sequences using, for example, algorithms such as those based on CLUSTALW computer program (Thompson (1994) Nucl. Acids Res. 2:4673-4680), CLUSTAL Omega (Sievers (2014) Curr. Protoc. Bioinformatics 48:3.13.1-3.13.16) or FASTDB (Brutlag (1990) Comp App Biosci 6:237-245). Also available to those having skill in this art are the BLAST, which stands for Basic Local Alignment Search Tool, and BLAST 2.0 algorithms (Altschul, (1997) Nucl. Acids Res. 25:3389-3402; Altschul (1990) J. Mol. Biol. 215:403-410) and related tools. The BLASTN program for nucleic acid sequences uses as defaults a word length (W) of 11, an expectation I of 10, M=5, N=4, and a comparison of both strands. The BLOSUM62 scoring matrix (Henikoff (1992) Proc. Natl. Acad. Sci. U.S.A. 89:10915-10919) uses alignments (B) of 50, expectatiI(E) of 10, M=5, N=4, and a comparison of both strands.

[0082] The polypeptide of the invention may be provided as isolated or purified protein. Isolated or purified in the context of the invention means that the polypeptide is substantially free from other proteins or contaminants. This may be achieved by the purification methods as described herein in the appended examples for exemplary transpeptidases of the invention.

[0083] It is clear for the skilled person that the polypeptide of the invention may comprise an affinity tag. The affinity tag is positioned C-terminally or internally (i.e. not N-terminal).

[0084] As evident from the description herein, the polypeptide of the invention may be non-natural and may be recombinantly expressed and generated by genetic engineering. In particular, the polypeptide of the invention may also be a non-naturally occurring fusion protein.

[0085] The polypeptide of the invention may be attached to a solid carrier. Said attachment is made in a manner that preserves the sequence specific transpeptidase activity according to the invention. Methods to test the transpeptidase activity of a polypeptide attached to a solid carrier are similar to the assays for testing transpeptidase activity of polypeptides as described herein elsewhere and disclosed in the appended Examples. The only difference is that instead of the polypeptide of the invention a solid carrier with a protein of the invention attached thereto (or multiple copies thereof) is contacted with the substrate proteins. To maintain catalytic activity of the polypeptide of the invention, the attachment of the polypeptide to the solid carrier is preferably mediated by a residue different from the N-terminal serine or threonine residue. For instance, the attachment to the solid carrier may be mediated via an internal residue (not the N-terminal and C-terminal residue) or via the C-terminus. Methods for attaching the polypeptide of the invention to a solid carrier are known in the art. In a preferred embodiment multiple copies of the polypeptide of the invention are attached to a solid carrier. In this context the different polypeptides attached to the solid carrier may be identical or different. In a preferred embodiment the polypeptides are identical. Non-limiting examples for a solid carrier according to the present invention are a polymer, a hydrogel, a microparticle, a nanoparticle, a sphere (e.g. a nano- or microsphere), beads (e.g. microbeads), quantum dots, prosthetics and a solid surface. In a preferred embodiment the carrier is a bead (e.g. a microbead), such as an agarose bead. Accordingly, the invention relates to beads (e.g. microbeads) having the polypeptide of the present invention attached thereto. Such beads with the polypeptide of the invention may represent a ready-to-use reagent for producing a fusion polypeptide

[0086] Accordingly, the invention also relates to kits comprising the polypeptide of the invention having transpeptidase activity. Said kit may comprise the polypeptide of the invention in a ready to use reaction mixture for producing a fusion polypeptide.

[0087] As mentioned herein above, the polypeptide of the invention has sequence specific transpeptidase activity. In the context of the DUF2121-containing polypeptide of the invention the sequence specificity is conferred by the recognition of a DUF2121 recognition motif or the C-terminal portion thereof in a substrate protein by the DUF2121 domain of the polypeptide of the invention. Thus, the sequence-specific transpeptidase activity according to the invention may comprise the capability of catalyzing the formation of a peptide bond between the most C-terminally positioned residue of an N-terminal portion of a first substrate polypeptide and the most N-terminally positioned residue of a C-terminal portion of a second substrate polypeptide so as to form a fusion polypeptide comprising the N-terminal portion of the first substrate polypeptide and the C-terminal portion of the second substrate polypeptide C-terminally fused thereto. The first and the second substrate polypeptide in this context each comprise a DUF2121 recognition motif comprising a sequence selected from the group consisting of SEQ ID NOs: 308, 309, 310 and 311, preferably SEQ ID NOs: 310 and 311, and most preferably SEQ ID NO: 311. The N-terminal portion of the first substrate peptide is preferably defined from the N-terminus of the first substrate peptide to the aspartate residue in position 2 of SEq ID NOs: 308, 309, 310 and 311, respectively. The C-terminal portion of the first substrate polypeptide is preferably defined from the proline residue in position 3 of SEQ ID NOs: 308, 309, 310 and 311, respectively, to the C-terminus of the sequence of the first substrate polypeptide. The N-terminal portion of the second substrate peptide is preferably defined from the N-terminus of the second substrate peptide to the aspartate residue in position 2 of SEQ ID NOs: 308, 309, 310 and 311 comprised therein, respectively. The C-terminal portion of the second substrate polypeptide is preferably defined from the proline residue in position 3 of SEQ ID NOs: 308, 309, 310 and 311, respectively, to the C-terminus of the sequence of the second substrate polypeptide.

[0088] The expression “most N-terminally positioned” as used herein means that an amino acid forms the first amino acid counted from the N-terminus defining a certain amino acid domain, fragment or portion. This first amino acid defining the start of the domain, fragment or portion does not form an N-terminus with a free amino group if the defined domain, fragment or portion is positioned internally in a protein.

[0089] The expression “most C-terminally positioned” as used herein means that an amino acid forms the last amino acid counted from the N-terminus defining a certain amino acid domain, fragment or portion. This last amino acid defining the end of the domain, fragment or portion does not form a C-terminus with a free carboxyl group if the defined domain, fragment or portion is positioned internally in a protein.

[0090] The appended Examples demonstrate that the polypeptide of the invention can also catalyze the formation of a peptide bond between the most C-terminally positioned residue of an N-terminal portion of a first substrate polypeptide comprising a DUF2121 recognition motif and the N-terminal amino acid of a second substrate polypeptide having at its N-terminus the C-terminal portion of a DUF2121 recognition motif (starting with the proline in position 3 of SEQ ID NOs: 308, 309, 310 and 311, respectively). Thus, the sequence-specific transpeptidase activity according to the invention may comprise the capability of catalyzing the formation of a peptide bond between the most C-terminally positioned residue of an N-terminal portion of a first substrate polypeptide and the N-terminal residue of a second substrate polypeptide so as to form a fusion polypeptide comprising the N-terminal portion of the first substrate polypeptide and the second substrate polypeptide C-terminally fused thereto. The first substrate polypeptide in this context preferably comprises a DUF2121 recognition motif, said DUF2121 recognition motif comprising an amino acid sequence selected from the group consisting of SEQ ID NOs: 308, 309, 310 and 311, preferably SEQ ID NOs: 310 and 311, most preferably SEQ ID NO: 311. The N-terminal portion of the first substrate polypeptide is preferably defined from the N-terminus thereof to the aspartate residue in position 2 of SEQ ID NOs: 308, 309, 310 and 311, respectively. The second substrate polypeptide preferably has at its N-terminus the C-terminal portion of a DUF2121 recognition motif. The C-terminal portion of a DUF2121 recognition motif starts with the amino acids defined in positions 3 to 5 of any one of SEQ ID NOs: 308 to 311.

[0091] It has been surprisingly found that the polypeptides of the invention have a sequence-specific transpeptidase activity; i.e. can be used for post-translational protein ligations.

[0092] Thus, in one aspect, the present invention relates to the use of the polypeptide of the invention as a sequence specific transpeptidase. The use as transpeptidase may specifically comprise catalyzing the post-translational ligation of two peptide or protein portions. Preferred sequence specific transpeptidase reactions that can be catalyzed by the polypeptide of the invention are disclosed herein in the context of the methods described. The disclosures in context of the methods described herein are disclosed as corresponding use mutatis mutandis.

[0093] The invention further relates to a nucleic acid encoding the polypeptide as described herein above. The terms “nucleic acid”, “polynucleotide”, “nucleic acid sequence”, “nucleic acid molecule” or “nucleotide sequence” are used interchangeably herein and refer to DNA, such as cDNA or genomic DNA, and RNA (e.g. messenger RNA). The polynucleotides used in accordance with the present invention may be of natural as well as of (semi) synthetic origin. The nucleic acids of the invention can e.g. be synthesized by standard chemical synthesis methods and/or recombinant methods, or produced semi-synthetically, e.g. by combining chemical synthesis and recombinant methods. Ligation of the coding sequences to transcriptional regulatory elements and/or to other amino acid encoding sequences can be carried out using established methods, such as restriction digests, ligations and molecular cloning.

[0094] The person skilled in the art is familiar with the preparation and the use of polynucleotides (see, e.g., Sambrook and Russel “Molecular Cloning, A Laboratory Manual” (2001), Cold Spring Harbor Laboratory, N.Y.).

[0095] The terms “encode” or “encoding” are used interchangeably with the terms “encode for” or “encoding for”, respectively. These terms mean that according nucleic acid sequence may serve as template for production of the “encoded amino acid sequence” according to the known rules of the genetic code. If organisms with a modified genetic code are used, the “encoding” nucleic acids may also include sequences adapted to such modifications in the genetic code.

[0096] The nucleic acid provided herein may be an open reading frame; i.e. a continuous stretch of codons capable of being translated to an amino acid sequence that starts with a translation start codon (including alternative start codons known in the art) and ends with a translation stop codon. The term “open reading frame” is interchangeably used with “coding sequence” herein. Accordingly, the nucleic acid of the invention may comprise further features required to express the nucleic acid sequence encoding the polypeptide of the invention in a host cell. For instance, the nucleic acid sequence may be operably linked to a promoter sequence. The nucleic acid molecule of the invention may further comprise regulatory sequences. Regulatory sequences are well known to those skilled in the art and include, without being limiting, regulatory sequences ensuring the initiation of transcription, internal ribosomal entry sites (IRES) (Owens (2001) Proc. Natl. Acad. Sci. U.S.A. 98:1471-1476) and optionally regulatory elements ensuring termination of transcription and stabilization of the transcript. Non-limiting examples for such regulatory elements ensuring the initiation of transcription comprise promoters, a translation initiation codon, enhancers, insulators and/or regulatory elements ensuring transcription termination, which are to be included downstream of the nucleic acid molecules of the invention. Further examples include Kozak sequences and intervening sequences flanked by donor and acceptor sites for RNA splicing, nucleotide sequences encoding secretion signals or, depending on the expression system used, signal sequences capable of directing the expressed protein to a cellular compartment or to the culture medium.

[0097] The present invention further relates to a vector comprising a nucleic acid of the invention; i.e. encoding a transpeptidase polypeptide as provided herein. Many suitable vectors are known to those skilled in molecular biology, the choice of which depends on the desired function. Non-limiting examples of vectors include plasmids, cosmids, viruses, bacteriophages and other vectors used conventionally in e.g. genetic engineering. Methods which are well known to those skilled in the art can be used to construct various plasmids and vectors (see for example Sambrook and Russel (2001) loc cit.; Ausubel (1989) Current Protocols in Molecular Biology, Green Publishing Associates and Wiley Interscience, N.Y.).

[0098] The vector preferably comprises a promoter being operably linked to the nucleic acid. “Operably linked” means that the promoter is positioned so that it drives the expression of the nucleic acid. Preferably, the vector of the invention is an expression vector. An expression vector according to this invention is capable of directing the replication and the expression of the nucleic acid molecule of the invention in a host or host cell and, accordingly, provides for the expression of the polypeptide of the present invention encoded thereby in the selected host or host cell. Expression comprises transcription of the nucleic acid molecule, for example into a translatable mRNA and translation into a polypeptide.

[0099] The nucleic acid molecules and/or vectors of the invention can be designed for introduction into cells by e.g. chemical based methods (polyethylenimine, calcium phosphate, liposomes, DEAE-dextrane, nucleofection), non chemical methods (electroporation, sonoporation, optical transfection, gene electrotransfer, hydrodynamic delivery or naturally occurring transformation upon contacting cells with the nucleic acid molecule of the invention), particle-based methods (gene gun, magnetofection, impalefection) phage vector-based methods and viral methods. For example, expression vectors derived from viruses such as retroviruses, vaccinia virus, adeno-associated virus, herpes viruses, Semliki Forest Virus or bovine papilloma virus, may be used for delivery of the nucleic acid molecules into targeted cell population. Additionally, baculoviral systems can also be used as vector in eukaryotic expression system for the nucleic acid molecules of the invention. In one embodiment, the nucleic acid molecules and/or vectors of the invention are designed for transformation of chemical competent E. coli by calcium phosphate and/or for transient transfection of HEK293 and CHO by polyethylenimine- or lipofectamine-transfection.

[0100] Non-limiting examples of vectors include pQE-12, the pUC-series, pBluescript (Stratagene), the pET-series of expression vectors (Novagen) or pCRTOPO (Invitrogen), lambda gtl 1, pJOE, the pBBR1-MCS series, pJB861, pBSMuL, pBC2, pUCPKS, pTACT1, pTRE, pCAL-n-EK, pESP-1, pOP13CAT, the E-027 pCAG Kosak-Cherry (L45a) vector system, pREP (Invitrogen), pCEP4 (Invitrogen), pMClneo (Stratagene), pXT1 (Stratagene), pSG5 (Stratagene), EBO-pSV2neo, pBPV-1, pdBPVMMTneo, pRSVgpt, pRSVneo, pSV2-dhfr, pIZD35, Okayama-Berg cDNA expression vector pcDV1 (Pharmacia), pRc/CMV, pcDNA1, pcDNA3 (Invitrogen), pcDNA3.1, pSPORT1 (GIBCO BRL), pGEMHE (Promega), pLXIN, pSIR (Clontech), pIRES-EGFP (Clontech), pEAK-10 (Edge Biosystems) pTriEx-Hygro (Novagen) and pCINeo (Promega). A preferred vector is the pET30 vector. This vector has also been used in the appended examples.

[0101] Further it is envisaged herein that the nucleic acid molecule or vectors as described herein are transfected into a host cell.

[0102] Accordingly, the present invention further relates to a host cell comprising a nucleic acid, a vector, or an expression vector as described herein above.

[0103] The host cell can be any prokaryotic or eukaryotic cell. The term “prokaryote” is meant to include all bacteria which can be transformed, transduced or transfected with DNA or DNA or RNA molecules for the expression of a protein of the invention. Prokaryotic hosts may include gram negative as well as gram positive bacteria such as, for example, E. coli, S. typhimurium, Serratia marcescens, Corynebacterium (glutamicum), Pseudomonas (fluorescens), Lactobacillus, Streptomyces, Salmonella and Bacillus subtilis.

[0104] Suitable bacterial expression hosts comprise e. g. strains derived from JM83, W3110, KS272, TG1, K12, BL21 (such as BL21(DE3), BL21(DE3)PlysS, BL21(DE3)RIL, BL21(DE3)PRARE) or Rosetta. In a preferred embodiment the bacterial expression host is E. coli BL21 Gold(DE3) as used in the appended examples.

[0105] The term “eukaryotic” is meant to include yeast, higher plant, insect and mammalian cells. Typical mammalian host cells include, Hela, HEK293, H9, Per.C6 and Jurkat cells, mouse NIH3T3, NS/0, SP2/0 and C127 cells, COS cells, e.g. COS 1 or COS 7, CV1, quail QC1-3 cells, mouse L cells, mouse sarcoma cells, Bowes melanoma cells and Chinese hamster ovary (CHO) cells. Other suitable eukaryotic host cells include, without being limiting, chicken cells, such as e.g. DT40 cells, or yeasts such as Saccharomyces cerevisiae, Pichia pastoris, Schizosaccharomyces pombe and Kluyveromyces lactis. Insect cells suitable for expression are e.g. Drosophila S2, Drosophila Kc, Spodoptera Sf9 and Sf21 or Trichoplusia Hi5 cells. Suitable zebrafish cell lines include, without being limiting, ZFL, SJD or ZF4.

[0106] The described vector(s) can either integrate into the genome of the host or can be maintained extrachromosomally. Once the vector has been incorporated into the appropriate host, the host is maintained under conditions suitable for high level expression of the nucleic acid molecules, and as desired, the collection and purification of the polypeptide of the invention may follow. Appropriate culture media and conditions for the above described host cells are known in the art.

[0107] The host cell described herein may express a methionyl aminopeptidase. A methionyl aminopeptidase is capable of removing the N-terminal methionine from a polypeptide. In other words the methionyl aminopeptidase removes the first amino acid from a polypeptide when the first amino acid is a methionine. A methionyl aminopeptidase may be able to remove the N-terminal methionine from a polypeptide of the present invention. A methionyl aminopeptidase may remove the methionine of an N-terminal MS or MT motif of a polypeptide of the present invention. A methionyl aminopeptidase used to remove the N-terminal serine or threonine of a polypeptide of the present invention may be E. coli MetAP (SEQ ID NO: 314).

[0108] The present invention further relates to a method for producing a polypeptide of the invention as described herein. The method may comprise cultivating the host cell as described herein above comprising the nucleic acid, the vector or the expression vector as described herein above under conditions conducive for production of the polypeptide and recovering said polypeptide from the cell culture and/or cells. The terms “recovering”, “purifying”, “collecting” and “isolating” are used interchangeably herein.

[0109] In the production methods of the present invention, the cells are cultivated in a nutrient medium suitable for production of the polypeptide using methods known in the art. For example, the cells may be cultivated by shake flask cultivation, and small-scale or large-scale fermentation (including continuous, batch, fed-batch, or solid state fermentations) in laboratory or industrial fermenters performed in a suitable medium and under conditions allowing the polypeptide to be expressed and/or isolated. The cultivation takes place in a suitable nutrient medium comprising carbon and nitrogen sources and inorganic salts, using procedures known in the art. Suitable media are available from commercial suppliers or may be prepared according to published compositions. If the polypeptide is secreted into the nutrient medium, the polypeptide can be recovered directly from the medium. If the polypeptide is not secreted, it can be recovered from cell lysates. The cell lysate may be prepared by lysing the cells by ultra sonification or using a french press.

[0110] The resulting polypeptide may be recovered by methods known in the art. For example, the polypeptide may be recovered from the nutrient medium by conventional procedures including, but not limited to, centrifugation, filtration, extraction, spray-drying, evaporation, or precipitation, chromatography (e.g., ion exchange, affinity, hydrophobic, chromatofocusing, and size exclusion), electrophoretic procedures (e.g., preparative isoelectric focusing), differential solubility (e.g., ammonium sulfate precipitation), SDS-PAGE, or extraction (see for example Jansen (1989) Protein Purification, VCH Publishers, New York). The resulting polypeptide may be detected by methods known in the art (e.g., SDS-PAGE and Coomassie staining or Western Blotting)

[0111] A polypeptide of the present invention, preferably M. jannaschii Adriase (MJ_0548) can be cloned with a C-terminal His₆-tag (SEQ ID NO: 385) into a pET30 vector (SEQ ID NO: 516) and transformed in BL21 DE3 cells carrying the pACYC-RIL plasmid. The transformed cells can be grown at 25° C. in lysogeny broth (LB). The kanamycin concentration may be kept at 25 μg/ml and the chloramphenicol concentration at 12.5 μg/ml. Protein expression may be induced at an optical density of 0.4 at 600 nm with 500 μM isopropyl-β-D-thiogalactoside. After 16 h, cells can be harvested and all subsequent steps may be conducted at 7° C. The cell pellet of His₆-tagged constructs can be resuspended in 100 mM Tris-HCl pH 8.0, 10 mM Imidazole, 5 mM MgCl₂, 50 μg/ml DNAse (Applichem) and cOmplete protease inhibitor (Roche). Cells may be lysed by three french press passages at 16000 psi, and cleared from cell debris by ultracentrifugation at 100000 g for 45 min. The supernatant can then filtered using a membrane filters (Millipore) with a pore size of 0.22 μm.

[0112] The His₆-tagged protein can be purified via HisTrap HP columns (the columns may be obtained from GE Healthcare) using an Akta Pure FPLC (GE Healthcare) with Unicorn v5.1.0 software. The filtered supernatant can be applied to the equilibrated column (20 mM Tris-HCl pH 8.0, 250 mM NaCl, 20 mM imidazole) and washed with 10 additional column volumes of the same buffer. Bound proteins can then be eluted by gradually increasing the imidazole concentration up to 300 mM. The eluted fractions can be analyzed via SDS-PAGE and those containing the protein of interest at comparatively high purity may be pooled and used for subsequent purification steps. The protein can be concentrated using Amicon centrifugal filters with a 10 kDa molecular weight cut-off (Merck) to a concentration of 10 g/l. Finally, a maximum of 0.02 column volumes of the concentrated proteins may be applied to a Superdex 75 size-exclusion column (buffer A: 20 mM HEPES-NaOH pH 7.5, 100 mM NaCl, 50 mM KCl, 0.5 mM TCEP). Eluted fractions can be analyzed via SDS-PAGE, pooled and concentrated as described above. For long-term storage, the protein containing fractions may be supplemented with 15% glycerol, flash frozen in liquid nitrogen and stored at −80° C.

[0113] Additional non-limiting examples of nucleotide sequences that might be fused to a tag for the production of polypeptides that have transpeptidase activity are SEq ID NOs: 312, 313, 389, 402 and 430. Said sequences also encode for polypeptides harboring an N-terminal methionine residue which has to be removed as described herein for the polypeptide to have transpeptidase activity according to the invention.

[0114] It is clear that all polypeptides, preferably SEQ ID NOs: 2-225 provided herein may be produced by the above described or other methods. The skilled person knows that the protein sequences have to be transformed in nucleotide sequences. Suitable tools are well known in the art, e.g. DNASTAR-Lasergene. It is of note that the start codon consisting of the nucleotides ATG may be added to induce translation of the polypeptide. Accordingly, the produced polypeptide may contain an N-terminal methionine residue. As mentioned herein the N-terminal methionine residue has to be removed to expose the catalytic serine or threonine residue at the N-terminus. A suitable measure may be to express the polypeptide in a host cell comprising a methionyl aminopeptidase as described herein.

[0115] The invention further relates to a method for producing a fusion polypeptide comprising contacting the polypeptide as defined herein with a first substrate polypeptide and a second substrate polypeptide, and reacting both substrate polypeptides.

[0116] Said method may comprise producing a fusion polypeptide.

[0117] The produced fusion polypeptide of said method may comprise a portion of the first substrate polypeptide and a portion of the second substrate polypeptide, or a portion of the first substrate polypeptide and the entire second polypeptide.

[0118] In the inventive method for producing a fusion polypeptide the first substrate polypeptide may comprise a DUF2121 recognition motif.

[0119] Note that all DUF2121 recognition motifs described herein are for illustrative purposes only and are in no way limiting besides the key motif X₁DPX₂A described herein. Also all SEQ ID NOs concerning DUF2121 recognition motifs are for illustrative purposes only and are in no way limiting. The skilled person is readily capable of identifying additional DUF2121 recognition motifs by the means and methods described herein.

[0120] In particular the DUF2121 recognition motif of the first substrate polypeptide may comprise and/or consist of an amino acid sequence selected from the group consisting of SEQ ID NOs: 308, 309, 310 and 311, preferably SEQ ID NOs: 310 and 311, most preferably SEQ ID NO: 311.

[0121] A further description of the first substrate polypeptide for the inventive polypeptide comprising an N-terminal DUF2121 domain as described herein is provided below.

[0122] Accordingly, in the inventive method for producing a fusion polypeptide the DUF2121 recognition motif of the first substrate polypeptide may comprise additional amino acids. Accordingly, the DUF2121 recognition motif of the first substrate polypeptide may comprise additionally at least 1, preferably at least 2, even more preferably at least 3, even more preferably at least 4, even more preferably at least 5, even more preferably at least 6, even more preferably at least 7, even more preferably at least 8, even more preferably at least 9, even more preferably at least 10 and most preferably at least 15 amino acids N-terminally of SEQ ID NOs: 308, 309, 310 and 311, respectively. Furthermore, the DUF2121 recognition motif of the first substrate polypeptide may comprise additionally at least 1, preferably at least 2, even more preferably at least 3, even more preferably at least 4, even more preferably at least 5, even more preferably at least 6, even more preferably at least 7, even more preferably at least 8, even more preferably at least 9, even more preferably at least 10 and most preferably at least 15 amino acids C-terminally of SEQ ID NOs: 308, 309, 310 and 311, respectively. Yet, also longer C-terminal additions are envisaged in context of the present invention for example as also illustrated in the experimental part. A DUF2121 recognition motif of the first substrate polypeptide additionally comprising at least 20 amino acids C-terminally of SEQ ID NOs: 308, 309, 310 and 311, respectively, may be particularly preferred.

[0123] Thus, in the inventive method for producing a fusion polypeptide the DUF2121 recognition motif of the first substrate polypeptide may comprise additionally at least 10, at least 15 or at least 20 amino acids C-terminally of SEQ ID NOs: 308, 309, 310 and 311, respectively.

[0124] The DUF2121 recognition motif of the first substrate polypeptide may comprise additionally at least 5 amino acids N-terminally and at least 10 amino acids C-terminally of SEQ ID NOs: 308, 309, 310 and 311, respectively.

[0125] The DUF2121 recognition motif of the first substrate polypeptide may comprise additionally at least 5 amino acids N-terminally and at least 15 amino acids C-terminally of SEQ ID NOs: 308, 309, 310 and 311, respectively.

[0126] The DUF2121 recognition motif of the first substrate polypeptide may comprise additionally at least 5 amino acids N-terminally and at least 20 amino acids C-terminally of SEQ ID NOs: 308, 309, 310 and 311, respectively.

[0127] The DUF2121 recognition motif of the first substrate polypeptide may additionally comprise a sequence identical to or at least 20%, preferably at least 30%, even more preferably at least 40%, even more preferably at least 50%, even more preferably at least 60%, even more preferably at least 70%, even more preferably at least 80%, even more preferably at least 90%, even more preferably at least 95% and most preferably at least 99% identical to a sequence as defined by position(s) 1 to 15, 2 to 15, 3 to 15, 4 to 15, 5 to 15, 6 to 15, 7 to 15, 8 to 15, 9 to 15, 10 to 15, 11 to 15, 12 to 15, 13 to 15, 14 to 15 or 15 of any one of SEQ TD NOs: 315-366, 460-510 and 551-661 N-terminally, preferably directly N-terminally of SEQ ID NOs: 308, 309, 310 and 311, respectively.

[0128] The DUF2121 recognition motif of the first substrate polypeptide may additionally comprise a sequence identical to or at least 20%, preferably at least 30%, even more preferably at least 40%, even more preferably at least 50%, even more preferably at least 60%, even more preferably at least 70%, even more preferably at least 80%, even more preferably at least 90%, even more preferably at least 95% and most preferably at least 99% identical to a sequence as defined by position(s) 21 to 30, 21 to 29, 21 to 28, 21 to 27, 21 to 26, 21 to 25, 21 to 24, 21 to 23, 21 to 22 or 21 of any one of SEQ ID NOs: 315-366, 460-510 and 551-661 C-terminally, preferably directly C-terminally of SEQ ID NO: 308, 309, 310 and 311, respectively.

[0129] The DUF2121 recognition motifs may also be longer compared to the motifs described and provided above. Accordingly, the DUF2121 recognition motif of the first substrate polypeptide may additionally comprise a sequence identical to or at least 20%, preferably at least 30%, even more preferably at least 40%, even more preferably at least 50%, even more preferably at least 60%, even more preferably at least 70%, even more preferably at least 80%, even more preferably at least 90%, even more preferably at least 95% and most preferably at least 99% identical to a sequence as defined by position(s) 21 to 40, 21 to 39, 21 to 38, 21 to 37, 21 to 36, 21 to 35, 21 to 34, 21 to 33, 21 to 32, 21 to 31 of any one of SEQ ID NOs: 551-661 C-terminally, preferably directly C-terminally of SEQ ID NOs: 308, 309, 310 and 311, respectively.

[0130] It is evident that a sequence defined by position(s) 21 to 40, 21 to 39, 21 to 38, 21 to 37, 21 to 36, 21 to 35, 21 to 34, 21 to 33, 21 to 32, 21 to 31 of any one of SEQ ID NOs: 551-661 may also comprise, for example, a sequence defined by positions 21 to 30 of any one of SEQ ID NOs: 315-366, 460-510 and 551-661. Thus, the DUF2121 recognition motif of the first substrate polypeptide may additionally comprise a sequence identical to or at least 20%, preferably at least 30%, even more preferably at least 40%, even more preferably at least 50%, even more preferably at least 60%, even more preferably at least 70%, even more preferably at least 80%, even more preferably at least 90%, even more preferably at least 95% and most preferably at least 99% identical to a sequence as defined by position(s) 21 to 30, 21 to 29, 21 to 28, 21 to 27, 21 to 26, 21 to 25, 21 to 24, 21 to 23, 21 to 22 or 21 of any one of SEQ ID NOs: 315-366, 460-510 and 551-661 C-terminally, preferably directly C-terminally of SEQ ID NO: 308, 309, 310 and 311, respectively, and/or may additionally comprise a sequence identical to or at least 20%, preferably at least 30%, even more preferably at least 40%, even more preferably at least 50%, even more preferably at least 60%, even more preferably at least 70%, even more preferably at least 80%, even more preferably at least 90%, even more preferably at least 95% and most preferably at least 99% identical to a sequence as defined by position(s) 21 to 40, 21 to 39, 21 to 38, 21 to 37, 21 to 36, 21 to 35, 21 to 34, 21 to 33, 21 to 32, 21 to 31 of any one of SEQ ID NOs: 551-661 C-terminally, preferably directly C-terminally of SEQ ID NOs: 308, 309, 310 and 311, respectively.

[0131] In a preferred embodiment of the inventive method for producing a fusion polypeptide the DUF2121 recognition motif of the first substrate polypeptide may consist of the sequence as defined in any one of SEQ ID NOs: 315-366, 460-510 and 551-661 or a sequence having or at least 20%, preferably at least 30%, even more preferably at least 40%, even more preferably at least 50%, even more preferably at least 60%, even more preferably at least 70%, even more preferably at least 80%, even more preferably at least 90%, even more preferably at least 95% and most preferably at least 99% sequence identity to said sequence.

[0132] In the inventive method for producing a fusion polypeptide the first substrate polypeptide may have an N-terminal portion defined from the N-terminus of the first substrate polypeptide to the aspartate residue in position 2 of SEQ ID NOs: 308, 309, 310 and 311, respectively.

[0133] In a preferred embodiment of the inventive method for producing a fusion polypeptide the second substrate polypeptide may comprise a DUF2121 recognition motif.

[0134] In a more preferred embodiment of the inventive method for producing a fusion polypeptide the DUF2121 recognition motif of the second substrate polypeptide may comprise and/or consist of an amino acid sequence selected from the group consisting of SEQ ID NOs: 308, 309, 310 and 311, preferably SEQ ID NOs: 310 and 311, most preferably SEQ ID NO: 311.

[0135] A further description of the second substrate polypeptide for the inventive polypeptide comprising an N-terminal DUF2121 domain as described herein is provided below. Accordingly, in the inventive method for producing a fusion polypeptide the DUF2121 recognition motif of the second substrate polypeptide may comprise additional amino acids. Accordingly, the DUF 2121 recognition motif of the second substrate polypeptide may additionally comprise at least 1, preferably at least 2, even more preferably at least 3, even more preferably at least 4, even more preferably at least 5, even more preferably at least 6, even more preferably at least 7, even more preferably at least 8, even more preferably at least 9, even more preferably at least 10 and most preferably at least 15 amino acids N-terminally of said SEQ ID NOs: 308, 309, 310 and 311, respectively.

[0136] The DUF 2121 recognition motif of the second substrate polypeptide may comprise at least 1, preferably at least 2, even more preferably at least 3, even more preferably at least 4, even more preferably at least 5, even more preferably at least 6, even more preferably at least 7, even more preferably at least 8, even more preferably at least 9, even more preferably at least 10 and most preferably at least 15 amino acids C-terminally of said SEQ ID NOs: 308, 309, 310 and 311, respectively.

[0137] As also described above a DUF2121 recognition motif of the second substrate polypeptide additionally comprising at least 20 amino acids C-terminally of SEQ ID NOs: 308, 309, 310 and 311, respectively, may be particularly preferred.

[0138] Thus, in the inventive method for producing a fusion polypeptide the DUF2121 recognition motif of the second substrate polypeptide may comprise additionally at least 10, at least 15 or at least 20 amino acids C-terminally of SEQ ID NOs: 308, 309, 310 and 311, respectively.

[0139] The DUF2121 recognition motif of the second substrate polypeptide may comprise at least 5 amino acids N-terminally and at least 10 amino acids C-terminally of said SEQ ID NOs: 308, 309, 310 and 311, respectively.

[0140] The DUF2121 recognition motif of the second substrate polypeptide may comprise at least 5 amino acids N-terminally and at least 15 amino acids C-terminally of said SEQ ID NOs: 308, 309, 310 and 311, respectively.

[0141] The DUF2121 recognition motif of the second substrate polypeptide may comprise at least 5 amino acids N-terminally and at least 20 amino acids C-terminally of said SEQ ID NOs: 308, 309, 310 and 311, respectively.

[0142] The DUF 2121 recognition motif of the second substrate polypeptide may comprise a sequence identical to or at least 20%, preferably at least 30%, even more preferably at least 40%, even more preferably at least 50%, even more preferably at least 60%, even more preferably at least 70%, even more preferably at least 80%, even more preferably at least 90%, even more preferably at least 95% and most preferably at least 99% identical to a sequence as defined by position(s) 1 to 15, 2 to 15, 3 to 15, 4 to 15, 5 to 15, 6 to 15, 7 to 15, 8 to 15, 9 to 15, 10 to 15, 11 to 15, 12 to 15, 13 to 15, 14 to 15 or 15 of any one of SEQ ID NOs: 315-366, 460-510 and 551-661N-terminally, preferably directly N-terminally of said SEQ ID NOs: 308, 309, 310 and 311, respectively.

[0143] The DUF 2121 recognition motif of the second substrate polypeptide may comprise a sequence identical to or at least 20%, preferably at least 30%, even more preferably at least 40%, even more preferably at least 50%, even more preferably at least 60%, even more preferably at least 70%, even more preferably at least 80%, even more preferably at least 90%, even more preferably at least 95% and most preferably at least 99% identical to a sequence as defined by position(s) 21 to 30, 21 to 29, 21 to 28, 21 to 27, 21 to 26, 21 to 25, 21 to 24, 21 to 23, 21 to 22 or 21 of any one of SEQ ID NOs: 315-366, 460-510 and 551-661C-terminally, preferably directly C-terminally of said SEQ ID NO: 308, 309, 310 and 311, respectively.

[0144] It is also envisaged that the DUF2121 recognition motifs are longer compared to the motifs described above. Accordingly, the DUF2121 recognition motif of the second substrate polypeptide may comprise a sequence identical to or at least 20%, preferably at least 30%, even more preferably at least 40%, even more preferably at least 50%, even more preferably at least 60%, even more preferably at least 70%, even more preferably at least 80%, even more preferably at least 90%, even more preferably at least 95% and most preferably at least 99% identical to a sequence as defined by position(s) 21 to 40, 21 to 39, 21 to 38, 21 to 37, 21 to 36, 21 to 35, 21 to 34, 21 to 33, 21 to 32, 21 to 31 of any one of SEQ ID NOs: 551-661 C-terminally, preferably directly C-terminally of said SEQ ID NO: 308, 309, 310 and 311, respectively.

[0145] Thus, the DUF 2121 recognition motif of the second substrate polypeptide may comprise a sequence identical to or at least 20%, preferably at least 30%, even more preferably at least 40%, even more preferably at least 50%, even more preferably at least 60%, even more preferably at least 70%, even more preferably at least 80%, even more preferably at least 90%, even more preferably at least 95% and most preferably at least 99% identical to a sequence as defined by position(s) 21 to 30, 21 to 29, 21 to 28, 21 to 27, 21 to 26, 21 to 25, 21 to 24, 21 to 23, 21 to 22 or 21 of any one of SEQ ID NOs: 315-366, 460-510 and 551-661C-terminally, preferably directly C-terminally of said SEQ ID NO: 308, 309, 310 and 311, respectively, and/or may comprise a sequence identical to or at least 20%, preferably at least 30%, even more preferably at least 40%, even more preferably at least 50%, even more preferably at least 60%, even more preferably at least 70%, even more preferably at least 80%, even more preferably at least 90%, even more preferably at least 95% and most preferably at least 99% identical to a sequence as defined by position(s) 21 to 40, 21 to 39, 21 to 38, 21 to 37, 21 to 36, 21 to 35, 21 to 34, 21 to 33, 21 to 32, 21 to 31 of any one of SEQ ID NOs: 551-661 C-terminally, preferably directly C-terminally of said SEQ ID NO: 308, 309, 310 and 311, respectively.

[0146] In a preferred embodiment of the inventive method for producing a fusion polypeptide the DUF2121 recognition motif of the second substrate polypeptide may consist of the sequence as defined in any one of SEQ ID NOs: 315-366, 460-510 and 551-661 or a sequence having at least 20%, preferably at least 30%, even more preferably at least 40%, even more preferably at least 50%, even more preferably at least 60%, even more preferably at least 70%, even more preferably at least 80%, even more preferably at least 90%, even more preferably at least 95% and most preferably at least 99% sequence identity to said sequence.

[0147] In the inventive method for producing a fusion polypeptide the DUF2121 recognition sequence of the second substrate polypeptide may be identical with the DUF2121 recognition sequence of the first substrate polypeptide.

[0148] In the inventive method for producing a fusion polypeptide the second substrate polypeptide may have a C-terminal portion defined from the proline residue in position 3 of SEQ ID NOs: 308, 309, 310 and 311, respectively to the C-terminus of the second substrate polypeptide.

[0149] In the inventive method for producing a fusion polypeptide the first substrate polypeptide may have an N-terminal portion defined from the N-terminus of the first substrate polypeptide to the aspartate residue in position 2 of SEQ ID NO: 308, 309, 310 and 311, respectively, the second substrate polypeptide may have a C-terminal portion defined from the proline residue in position 3 of SEQ ID NOs: 308, 309, 310 and 311, respectively, to the C-terminus of the second substrate polypeptide and the produced fusion protein may comprise the N-terminal portion of the first substrate polypeptide and the C-terminal portion of the second substrate polypeptide C-terminally fused thereto.

[0150] In the inventive method for producing a fusion polypeptide the second substrate polypeptide may comprise a C-terminal portion of a DUF2121 recognition motif, said C-terminal portion of the DUF2121 recognition motif being positioned N-terminally of the second substrate polypeptide.

[0151] In the inventive method for producing a fusion polypeptide the C-terminal portion of the DUF2121 recognition motif may start with the amino acid sequence as defined in positions 3 to 5 of any one of SEQ ID NOs: 308, 309, 310 and 311, preferably SEQ ID NOs: 310 and 311, most preferably SEQ ID NO: 311.

[0152] In the inventive method for producing a fusion polypeptide the C-terminal portion of the DUF2121 recognition motif of the second substrate polypeptide may comprise additional amino acids. Accordingly, the C-terminal portion of the DUF2121 recognition motif may additionally comprise at least 1, preferably at least 2, even more preferably at least 3, even more preferably at least 4, even more preferably at least 5, even more preferably at least 6, even more preferably at least 7, even more preferably at least 8, even more preferably at least 9, even more preferably at least 10 and most preferably at least 15 amino acids C-terminally, preferably directly C-terminally of the N-terminal amino acids as defined by positions 3 to 5 of SEQ ID NOs: 308, 309, 310 and 311, respectively.

[0153] A C-terminal portion of the DUF2121 recognition motif additionally comprising at least 20 amino acids C-terminally, preferably directly C-terminally of the N-terminal amino acids as defined by positions 3 to 5 of SEQ ID NOs: 308, 309, 310 and 311, respectively, may be particularly preferred.

[0154] Accordingly, a C-terminal portion of the DUF2121 recognition motif may additionally comprise at least 10, at least 15 or at least 20 amino acids C-terminally, preferably directly C-terminally of the N-terminal amino acids as defined by positions 3 to 5 of SEQ ID NOs: 308, 309, 310 and 311.

[0155] The C-terminal portion of the DUF2121 recognition motif of the second substrate polypeptide may additionally comprise a sequence identical to or at least 20%, preferably at least 30%, even more preferably at least 40%, even more preferably at least 50%, even more preferably at least 60%, even more preferably at least 70%, even more preferably at least 80%, even more preferably at least 90%, even more preferably at least 95% and most preferably at least 99% identical to a sequence as defined by position(s) 21 to 30, 21 to 29, 21 to 28, 21 to 27, 21 to 26, 21 to 25, 21 to 24, 21 to 23, 21 to 22 or 21 of any one of SEQ ID NOs: 315-366, 460-510 and 551-661 C-terminally, preferably directly C-terminally of the N-terminal amino acids as defined by positions 3 to 5 of SEQ ID NOs: 308, 309, 310 and 311, respectively.

[0156] It is also envisaged that the C-terminal portion of the DUF2121 recognition motif is longer compared to the motifs described above. Accordingly, the C-terminal portion of the DUF2121 recognition motif of the second substrate polypeptide may additionally comprise a sequence identical to or at least 20%, preferably at least 30%, even more preferably at least 40%, even more preferably at least 50%, even more preferably at least 60%, even more preferably at least 70%, even more preferably at least 80%, even more preferably at least 90%, even more preferably at least 95% and most preferably at least 99% identical to a sequence as defined by position(s) 21 to 40, 21 to 39, 21 to 38, 21 to 37, 21 to 36, 21 to 35, 21 to 34, 21 to 33, 21 to 32, 21 to 31 of any one of SEQ ID NOs: 551-661 C-terminally, preferably directly C-terminally of the N-terminal amino acids as defined by positions 3 to 5 of SEQ ID NOs: 308, 309, 310 and 311, respectively.

[0157] Thus, the C-terminal portion of the DUF2121 recognition motif of the second substrate polypeptide may additionally comprise a sequence identical to or at least 20%, preferably at least 30%, even more preferably at least 40%, even more preferably at least 50%, even more preferably at least 60%, even more preferably at least 70%, even more preferably at least 80%, even more preferably at least 90%, even more preferably at least 95% and most preferably at least 99% identical to a sequence as defined by position(s) 21 to 30, 21 to 29, 21 to 28, 21 to 27, 21 to 26, 21 to 25, 21 to 24, 21 to 23, 21 to 22 or 21 of any one of SEQ ID NOs: 315-366, 460-510 and 551-661 C-terminally, preferably directly C-terminally of the N-terminal amino acids as defined by positions 3 to 5 of SEQ ID NOs: 308, 309, 310 and 311, respectively, and/or may additionally comprise a sequence identical to or at least 20%, preferably at least 30%, even more preferably at least 40%, even more preferably at least 50%, even more preferably at least 60%, even more preferably at least 70%, even more preferably at least 80%, even more preferably at least 90%, even more preferably at least 95% and most preferably at least 99% identical to a sequence as defined by position(s) 21 to 40, 21 to 39, 21 to 38, 21 to 37, 21 to 36, 21 to 35, 21 to 34, 21 to 33, 21 to 32, 21 to 31 of any one of SEQ ID NOs: 551-661 C-terminally, preferably directly C-terminally of the N-terminal amino acids as defined by positions 3 to 5 of SEQ ID NOs: 308, 309, 310 and 311, respectively.

[0158] The appended examples demonstrate that depending on the substrate 10, 15 or 20 preferably directly C-terminally of the N-terminal amino acids as defined by positions 3 to 5 of SEQ ID NOs: 308, 309, 310 and 311, respectively, may allow efficient ligations.

[0159] In the inventive method for producing a fusion polypeptide the C-terminal portion of the DUF 2121 recognition motif of the second substrate polypeptide may consist of the amino acid sequence as defined in positions 16 to 30 of any one of SEQ ID NOs: 315-366, 460-510 and 551-661 or an amino acid sequence having at least 20%, preferably at least 30%, even more preferably at least 40%, even more preferably at least 50%, even more preferably at least 60%, even more preferably at least 70%, even more preferably at least 80%, even more preferably at least 90%, even more preferably at least 95% and most preferably at least 99% sequence identity to said sequence.

[0160] The C-terminal portion of the DUF 2121 recognition motif of the second substrate polypeptide may also consist of the amino acid sequence as defined in positions 16 to 35 of any one of SEQ ID NOs: 551-661 or an amino acid sequence having at least 20%, preferably at least 30%, even more preferably at least 40%, even more preferably at least 50%, even more preferably at least 60%, even more preferably at least 70%, even more preferably at least 80%, even more preferably at least 90%, even more preferably at least 95% and most preferably at least 99% sequence identity to said sequence.

[0161] The C-terminal portion of the DUF 2121 recognition motif of the second substrate polypeptide may also consist of the amino acid sequence as defined in positions 16 to 40 of any one of SEQ ID NOs: 551-661 or an amino acid sequence having at least 20%, preferably at least 30%, even more preferably at least 40%, even more preferably at least 50%, even more preferably at least 60%, even more preferably at least 70%, even more preferably at least 80%, even more preferably at least 90%, even more preferably at least 95% and most preferably at least 99% sequence identity to said sequence. In the inventive method for producing a fusion polypeptide the produced fusion polypeptide may comprise the complete second substrate polypeptide, preferably C-terminally when the C-terminal portion of the DUF2121 recognition motif being positioned N-terminally of the second substrate polypeptide

[0162] In the inventive method for producing a fusion polypeptide the first substrate polypeptide may have an N-terminal portion defined from the N-terminus of the first substrate polypeptide to the aspartate residue in position 2 of SEQ ID NO: 308, 309, 310 and 311, respectively, a C-terminal portion of the DUF2121 recognition motif as described herein above is positioned N-terminally of the second substrate polypeptide and the produced fusion polypeptide comprises the N-terminal portion of the first substrate polypeptide and the second substrate polypeptide C-terminally fused thereto.

[0163] In the inventive method for producing a fusion polypeptide the polypeptide of the present invention as described herein may be brought into contact with the first and the second substrate polypeptide as described herein simultaneously.

[0164] Accordingly, the polypeptide of the present invention may be brought into contact with the first substrate polypeptide as described herein and the second substrate polypeptide as described herein not simultaneously. Thus, in the inventive method for producing a fusion polypeptide of the present invention as described herein may be brought into contact with the first substrate polypeptide as described herein and the second substrate polypeptide as described herein may be only added after the first substrate polypeptide.

[0165] The polypeptide of the present invention can be attached to a solid carrier when contacted with the substrate polypeptides. Accordingly, in the inventive method for producing a fusion polypeptide the polypeptide of the present invention as described herein may be attached to a solid carrier and the solid carrier may be washed after addition of the first substrate polypeptide as described herein and before addition of the second substrate polypeptide as described herein.

[0166] The inventive method for producing a fusion polypeptide may be performed in vitro.

[0167] Although clear for the skilled person, it is noted that the fusion polypeptide produced by the inventive method can be collected. Thus, the inventive method for producing a fusion polypeptide may comprise collecting the produced fusion polypeptide. The terms “recovering”, “purifying”, “collecting” and “isolating” are used interchangeably herein. The produced polypeptide may be recovered by methods known in the art. For example, the polypeptide may be recovered from the reaction composition by conventional procedures including, but not limited to, centrifugation, filtration, extraction, spray-drying, evaporation, or precipitation. In another aspect the produced fusion polypeptide may be purified by chromatography (e.g., ion exchange, affinity, hydrophobic, chromatofocusing, and size exclusion), electrophoretic procedures (e.g., preparative isoelectric focusing), differential solubility (e.g., ammonium sulfate precipitation), SDS-PAGE, or extraction (see for example Jansen (1989) Protein Purification, VCH Publishers, New York). Non-limiting examples for affinity tags used in affinity chromatography are the His₆-tag or the Strep-tag. The affinity tags bind to the corresponding affinity matrix. The affinity matrix may be a solid carrier comprising the structure having affinity for the affinity tag. Said structure may be Ni²⁺-NTA for the His₆-tag and streptavidin for the Strep-tag. Definition and examples for solid carriers are provided herein.

[0168] In one aspect the method for producing a fusion polypeptide in context of the present invention and collecting the produced fusion polypeptide may comprise
[0169] (i) incubating a first substrate polypeptide and a second substrate polypeptide each comprising an identical affinity tag in the portion not forming the desired fusion polypeptide with a polypeptide having transpeptidase activity comprising an affinity tag identical to the affinity tag of the substrate polypeptides
[0170] (ii) producing the fusion polypeptide
[0171] (iii) applying the reaction mixture to a corresponding affinity matrix
[0172] (iv) incubating the reaction mixture with said solid carrier allowing the affinity matrix to bind the affinity tags, and
[0173] (v) collecting the flow through comprising the desired produced fusion polypeptide.

[0174] It has to be pointed out that the affinity tags attached to the substrate polypeptides and to the polypeptide having transpeptidase may be not identical. The affinity matrices used have to be adapted accordingly.

[0175] The skilled is well aware how produced fusion polypeptides not comprising an affinity tag can be purified. For example, size-exclusion chromatography may be used if the produced fusion polypeptide differs substantially in size from the substrate polypeptide and the polypeptide having transpeptidase activity used. Furthermore, if the produced fusion polypeptide has a substantially different isoelectric point compared to the substrate polypeptides and the transpeptidase used the produced fusion polypeptide may be recovered via ion exchange chromatography. Further, it is clear that different purification strategies can be combined. For example, a transpeptidase containing an affinity tag may be removed from the reaction mixture and the residual reaction mixture may be applied to size-exclusion chromatography or ion exchange chromatography.

[0176] The invention also provides means and methods to generate and purify enzyme-substrate complexes comprising a protein of interest with the N-terminal portion of the DUF2121 recognition motif fused to the polypeptide of the present invention. The generation of these complexes may contain steps of
[0177] (i) obtaining a sample containing the protein of interest fused to the DUF2121 recognition motif.
[0178] (ii) immobilizing the polypeptide of the present invention on a solid carrier
[0179] (iii) incubating the sample containing the protein of interest fused to the DUF2121 recognition motif with the carrier-bound polypeptide of the present invention.
[0180] (iv) thereby producing a fusion polypeptide comprising the protein of interest with the N-terminal portion of the DUF2121 recognition motif fused to the polypeptide of the present invention
[0181] (v) washing the carrier with suitable buffers and thereby removing excess substrate containing the C-terminal portion of the DUF2121 recognition motif
[0182] (vi) optionally, removing the protein of interest with the N-terminal portion of the DUF2121 recognition motif fused to the polypeptide of the present invention from the solid carrier.

[0183] Suitable carriers are well known in the art. Non-limiting examples are polymers, a hydrogel, a microparticle, a nanoparticle, a sphere (e.g. a nano- or microsphere), beads (e.g. microbeads), quantum dots, prosthetics and a solid surface. In a preferred embodiment the carrier is a bead (e.g. a microbead), such as an agarose bead.

[0184] Such enzyme-substrate complexes may represent a ready-to-use reagent for producing a fusion polypeptide. In a preferred embodiment, a first protein of interest with the N-terminal portion of the DUF2121 recognition motif fused to the polypeptide of the present invention is brought in contact with a second protein of interest comprising the C-terminal portion of the DUF2121 recognition motif. Thereby, a fusion polypeptide comprising the first protein of interest at the N-terminal end and the second protein of interest at the C-terminal end is generated.

[0185] The invention also provides means and methods to produce fusion polypeptides comprising non-proteinaceous moieties.

[0186] Accordingly, in the inventive method for producing a fusion polypeptide the portion of the first substrate polypeptide or the portion of the second substrate polypeptide forming part of the produced fusion polypeptide may comprise a non-proteinaceous moiety attached thereto so that the produced fusion polypeptide comprises said non-proteinaceous moiety. Furthermore, the portion of the first substrate polypeptide and the portion of the second substrate polypeptide forming part of the produced fusion polypeptide may comprise a non-proteinaceous moiety attached thereto so that the produced fusion polypeptide comprises said non-proteinaceous moieties. The non-proteinaceous moiety attached to the portion of the first substrate polypeptide forming part of the produced fusion polypeptide may be different or identical to the non-proteinaceous moiety attached to the portion of the second substrate polypeptide forming part of the produced fusion polypeptide. Accordingly, the produced fusion polypeptide may contain two different or two identical non-proteinaceous moieties.

[0187] The above mentioned non-proteinaceous moiety may be a fluorophore, a drug, a toxin, a carbohydrate, a lipid, a solid carrier, an oligonucleotide or a combination thereof. Non-limiting examples of said non-proteinaceous moieties are depicted in FIGS. 16 A, B and C.

[0188] Fluorophores are known in the art and are publicly and/or commercially available. Non-limiting examples are, e.g., fluorescein, FITC, Atto488 and Alexa488.

[0189] The term“drug” relates to medicinal or preventive agents. A drug may be a small molecule drug. Non-limiting examples of the small molecules are doxorubicin, calicheamicin, camptothecin, fumagillin, dexamethasone, geldanamycin, paclitaxel, docetaxel, irinotecan, cyclosporine, buprenorphine, naltrexone, naloxone, vindesine, vancomycin, risperidone, aripiprazole, palonosetron, granisetron, cytarabine, NX1838, leuprolide, goserelin, buserelin, octreotide, teduglutide, cilengitide, abarelix, enfuvirtide, ghrelin and derivatives, tubulysins and platin derivatives. The term “toxin” relates to agents which might have adverse effects on living organisms or cells.

[0190] Non-limiting examples of a solid carrier are described herein above.

[0191] The oligonucleotide may be a DNA, RNA or analogues of DNA or RNA made from nucleotide analogues.

[0192] It has to be pointed out that fluorophores are not limited to non-proteinaceous fluorophores but may also be fluorescent proteins. Non-limiting examples of fluorescent proteins are green fluorescent protein (GFP) or red fluorescent protein (RFP) or derivatives thereof.

[0193] Further it has to be noted that drugs that can be used in context of the present invention are not limited to small molecules but may also be or comprise biologically active peptides or proteins. Non-limiting examples for biologically active peptides or proteins are follicle-stimulating hormone, glucocerebrosidase, thymosin alpha 1, glucagon, somatostatin, adenosine deaminase, interleukin 11, hematide, leptin, interleukin-20, interleukin-22 receptor subunit alpha (IL-22ra), interleukin-22, hyaluronidase, fibroblast growth factor 18, fibroblast growth factor 21, glucagon-like peptide 1, osteoprotegerin, IL-18 binding protein, growth hormone releasing factor, soluble TACI receptor, thrombospondin-1, soluble VEGF receptor Flt-1, α-galactosidase A, myostatin antagonist, gastric inhibitory polypeptide, alpha-1 antitrypsin, IL-4 mutein, and the like.

[0194] In the method for producing a fusion polypeptide in context of the present invention the portion of the first substrate polypeptide or the portion of the second substrate polypeptide forming part of the produced fusion polypeptide may comprise an antibody, a domain or fragment thereof. It is envisaged herein to use the method of the present invention to create bispecific antibodies, hybrid antibodies or to couple other molecules like fluorophores or drugs to antibodies (FIG. 16 D).

[0195] An “antibody,” is used herein in the broadest sense, encompasses various antibody structures and can be any molecule that can specifically or selectively bind to a target protein. An antibody may include or be an antibody or a domain/fragment thereof, wherein the domain/fragment shows the substantially the same binding activity as the full-length antibody. Non-limiting examples are monoclonal antibodies, polyclonal antibodies, or multispecific antibodies (e.g., bispecific antibodies). Antibodies within the present invention may also be chimeric antibodies, recombinant antibodies, humanized antibodies or fully-human antibodies. Examples of antibody fragments include but are not limited to Fv, Fab, Fab′, Fab′-SH, F(ab′)2.

[0196] Antibodies may also include multivalent molecules, multi-specific molecules (e.g., diabodies), fusion molecules, aptimers, avimers, or other naturally occurring or recombinantly created molecules. Illustrative antibodies useful in the present invention include antibody-like molecules. An antibody-like molecule is a molecule that can exhibit functions by binding to a target molecule (see for example Gill (2006) Curr Opin Biotechnol 17:653-658; Nygren (1997) Curr Opin Struct Biol 7:463-469; Hosse (2006) Protein Sci 15:14-27), and includes, for example, DARPins (WO 2002/020565), Affibody (WO 1995/001937), Avimer (WO 2004/044011; WO 2005/040229), Adnectin (WO 2002/032925) and fynomers (WO 2013/135588).

[0197] The present invention is also useful to fuse an enzyme to a polypeptide or to another enzyme. Accordingly, in the inventive method for producing a fusion polypeptide the portion of the first substrate polypeptide or the portion of the second substrate polypeptide forming part of the produced fusion polypeptide may comprise an enzyme attached thereto so that the produced fusion polypeptide comprises said enzyme. Furthermore, the portion of the first substrate polypeptide and the portion of the second substrate polypeptide forming part of the produced fusion polypeptide may comprise an enzyme attached thereto so that the produced fusion polypeptide comprises said enzymes. The enzyme attached to the portion of the first substrate polypeptide forming part of the produced fusion polypeptide may be different or identical to the enzyme attached to the portion of the second substrate polypeptide forming part of the produced fusion polypeptide. Accordingly, the produced fusion polypeptide may contain two different or two identical enzymes. In general, the term “enzyme” is used herein in the broadest sense and encompasses all macromolecules that are able to catalyze chemical reactions.

[0198] It is envisaged herein to use the method of the present invention to immobilize proteins on solid carriers. Accordingly, in the inventive method for producing a fusion polypeptide the portion of the first substrate polypeptide or the portion of the second substrate polypeptide forming part of the produced fusion polypeptide may comprise a protein and the portion of the other substrate polypeptide forming part of the produced fusion polypeptide may have a solid carrier attached thereto so that the produced fusion polypeptide comprises the protein immobilized on the solid carrier, preferably the protein may be an enzyme. It is understood by the skilled person that a solid carrier can contain several substrate polypeptides allowing to immobilize several protein molecules to the solid carrier. Accordingly, a solid carrier with several substrate polypeptides allows to immobilize different protein molecules to the solid carrier (FIG. 16 E).

[0199] It is also envisaged herein to use the method of the invention for covalent and/or geometrically defined attachment of proteins and/or protein complexes on surfaces/solid carriers for microscopy applications, e.g. electron microscopy, especially cryo-electron microscopy.

[0200] In the inventive method for producing a fusion polypeptide the first substrate polypeptide and the second substrate polypeptide may be isotopically labeled. Preferably, either the first or the second polypeptide may be isotopically labeled. Such segmentally labeled fusion polypeptides may be used in NMR experiments (FIG. 16 F).

[0201] The expression “isotopically labeled” is used herein in the broadest sense and may relate to non-radioactive (like [¹³C]carbon, [²H]deuterium, [¹⁵N]nitrogen) or radioactive labels (like [³H]hydrogen, [¹²⁵I]iodide or [¹²³I]iodide).

[0202] It was shown that strong immune reactions can be triggered by fusing an immunogenic structure to a virus like particle. However, genetically fusing an immunogenic structure of interest to the viral structural protein can lead to impaired virus like particle assembly. The present invention allows to circumvent said caveat. Thus, the present invention provides also means and methods to create highly immunogenic compounds. Accordingly, in the inventive method for producing a fusion polypeptide the portion of the first substrate polypeptide or the portion of the second substrate polypeptide forming part of the produced fusion polypeptide may be part of a virus-like particle and the portion of the other substrate polypeptide forming part of the produced fusion polypeptide may comprise an immunogenic structure.

[0203] Virus like particles are molecules that closely resemble viruses, but are non-infectious because they contain no viral genetic material. It is well known in the art how virus like particles can be produced (Zeltins (2013) Mol Biotechnol 53(1):92-107). The term “immunogenic structure” is used herein in the broadest sense and relates to all molecules that trigger any sort of immune response in a human or an animal.

[0204] The skilled person is well aware that the inventive method for producing a fusion polypeptide allows to fuse several different immunogenic structures to a virus like particle. The immunogenic structures may be an influenza antigen, a pox antigen, a SARS-CoV-2 antigen and a measles antigen (FIG. 16 G). The immunogenic compound depicted in FIG. 16 G may be used to vaccine an individuum against influenza, pox and measles simultaneously.

[0205] The present invention also provides means and methods to fuse polypeptides to membranes. In the inventive method for producing a fusion polypeptide the portion of the first substrate polypeptide or the portion of the second substrate polypeptide forming part of the produced fusion polypeptide may be comprised in a membrane, preferably a vesicle membrane. The substrate polypeptides may be anchored in the membrane for example by outer membrane protein A (FIG. 16 H).

[0206] It is clear for the skilled person that the inventive method for producing a fusion polypeptide may be performed with substrate polypeptides containing disulfide bonds. Accordingly, in the method for producing a fusion polypeptide in context of the present invention the first substrate polypeptide may comprise an intramolecular disulfide bond, preferably the first cysteine residue forming the disulfide bond is located N-terminally of the DUF2121 recognition sequence and the second cysteine residue forming the disulfide bond is located C-terminally of the DUF2121 recognition motif FIG. 16 J depicts a potential reaction involving a substrate polypeptide containing a disulfide bond.

[0207] It can be useful that the fusion polypeptide produced by the method of the present invention contains an affinity tag. Accordingly, in the inventive method for producing a fusion polypeptide the portion of the first substrate polypeptide or the portion of the second substrate polypeptide forming part of the produced fusion polypeptide may comprise an affinity tag. In another aspect the portion of the first substrate polypeptide forming part of the produced fusion polypeptide may comprise a first affinity tag, and the portion of the second substrate polypeptide forming part of the produced fusion polypeptide may comprise a second affinity tag. Preferably the first and second affinity tags are different.

[0208] The skilled person is well aware how affinity chromatography can be used to purify the produced fusion polypeptides containing affinity tags. Examples for affinity tags and corresponding affinity matrices are described herein.

[0209] It is also envisaged that the polypeptide of the present invention and the method for producing a fusion polypeptide can be used in protein purification (FIG. 16 K). Specifically, the N-terminal portion of a protein of interest containing a DUF2121 recognition sequence as described herein may be purified.

[0210] Accordingly, said protein purification may comprise the steps of:
[0211] (i) immobilizing the polypeptide of the present invention to a column resin
[0212] (ii) contacting the polypeptide of the present invention immobilized to a column resin with the protein of interest containing a DUF2121 recognition motif as described herein
[0213] (iii) forming a covalent bond between the catalytic serine or threonine residue of the polypeptide of the present invention and the N-terminal portion of the protein of interest defined from the N-terminus of the protein of interest to the aspartate residue in position 2 of SEQ ID NO: 308, 309, 310 and 311, respectively
[0214] (iv) eluting the N-terminal portion of the protein of interest by applying to the column an elution polypeptide containing N-terminally the C-terminal portion of the DUF2121 recognition motif as described herein
[0215] (v) collecting the fusion polypeptide containing the N-terminal portion of the protein of interest and the elution polypeptide.

[0216] Further it is envisaged herein that catalytically inactive variants of the polypeptide of the present invention may be used in protein purification (FIG. 16 L). Specifically, proteins containing a DUF2121 recognition motif as described herein or the C-terminal portion of DUF2121 domain as described herein can be purified using the catalytically inactive variant of the polypeptide of the present invention. Said catalytically inactive variant may be a polypeptide of the present invention in which the catalytic serine or threonine residue is exchanged by another amino acid, preferably the catalytic residue is exchanged by alanine.

[0217] Accordingly, said protein purification using catalytically inactive variants of the polypeptide of the present invention may comprise the steps of:
[0218] (i) immobilizing the catalytically inactive polypeptide of the present invention to a column resin
[0219] (ii) contacting the polypeptide of the present invention immobilized to a column resin with the protein of interest containing a DUF2121 recognition motif as described herein or N-terminally a C-terminal portion of the DUF2121 recognition motif as described herein
[0220] (iii) forming a non-covalent interaction between the catalytically inactive polypeptide of the present invention and the protein of interest
[0221] (iv) eluting the protein of interest by applying to the column a polypeptide containing N-terminally the C-terminal portion of the DUF2121 recognition motif as described herein
[0222] (v) collecting the eluted protein of interest.

[0223] The skilled person is well aware which material can be used as column resin. Basically, material as described for the term “solid carrier” may be used as column resin.

[0224] It is further envisaged that the polypeptide of the present invention and the method for producing a fusion polypeptide of the present invention are used to obviate the need for antibodies for detection of proteins in Western Blotting (FIG. 16 M).

[0225] Accordingly, the said protein detection may contain the steps of
[0226] (i) transferring the protein to be detected containing N-terminally the C-terminal portion of the DUF2121 recognition motif as described herein to a membrane
[0227] (ii) incubating the membrane with the polypeptide of the present invention and a reporter polypeptide containing a DUF2121 recognition motif as described herein and a detectable marker N-terminally of the DUF2121 recognition motif
[0228] (iii) thereby producing a fusion polypeptide comprising the N-terminal portion of the reporter polypeptide comprising the detectable marker and the protein to be detected
[0229] (iv) detecting said fusion polypeptide via the detectable marker.

[0230] It also further envisaged that the polypeptide of the present invention and the method for producing a fusion polypeptide of the present invention are used to detect proteins in a complex mixture. The detection of said protein may contain the steps of
[0231] (i) obtaining a sample containing the protein of interest fused to the DUF2121 recognition motif. Preferentially, the C-terminal portion of the DUF2121 recognition motif should be fused N-terminally of the protein of interest
[0232] (ii) incubating this sample with the polypeptide of the present invention and a reporter polypeptide containing a DUF2121 recognition motif as described herein and a detectable marker, preferentially N-terminally of the DUF2121 recognition motif
[0233] (iii) thereby producing a fusion polypeptide comprising the reporter polypeptide with the detectable marker and the protein to be detected
[0234] (iv) separating the proteins within the sample via SDS-PAGE. Optionally, the proteins can be transferred to a membrane in a second step
[0235] (v) detecting said fusion polypeptide in the gel or on the membrane via the detectable marker.

[0236] Furthermore, a second method is envisaged, in which the polypeptide of the present invention and the method for producing a fusion polypeptide of the present invention are used to detect proteins in a complex mixture. The detection of said protein may contain the steps of
[0237] (i) obtaining a sample containing the protein of interest fused to the DUF2121 recognition motif. Preferentially, the C-terminal portion of the DUF2121 recognition motif should be fused N-terminally of the protein of interest
[0238] (ii) immobilizing the sample containing the protein of interest fused to the DUF2121 recognition motif on a microplate.
[0239] (iii) incubating said sample with the polypeptide of the present invention and a reporter polypeptide containing a DUF2121 recognition motif as described herein and a detectable marker, preferentially N-terminally of the DUF2121 recognition motif
[0240] (iv) thereby producing a fusion polypeptide comprising the reporter polypeptide with the detectable marker and the protein to be detected
[0241] (v) detecting said fusion polypeptide on the microplate via the detectable marker.

[0242] It also further envisaged that the polypeptide of the present invention and the method for producing a fusion polypeptide of the present invention are used to detect recombinant proteins containing a DUF2121 recognition motif. The skilled person is aware how to use routine methods to produce the desired recombinant protein with the DUF2121 recognition motif. Suitable techniques for the genetic introduction of the DUF2121 motif are well known in the art. Non-limiting examples include gene delivery through viruses, CaCl₂), liposomes, heat shock, electroporation or microinjection and gene editing using restriction enzymes, homologous recombination, CRISPR/Cas9, TALEN, Zinc finger and meganucleases. Specifically, the generation of cells capable of producing antibodies containing a DUF2121 recognition motif is envisaged. The skilled person is aware how these cells can be produced by routine methods. The skilled person is also aware how to use routine methods to select for cells capable of producing antibodies that contain a DUF2121 recognition motif and recognize the antigen of interest. The detection of such antigens may comprise steps of:
[0243] (i) incubating the antibodies bearing the DUF2121 recognition motif with the polypeptide of the present invention and a detectable maker bearing the DUF2121 recognition motif
[0244] (ii) thereby producing antibodies fused to the detectable maker
[0245] (iii) immobilizing the antigen of interest on a carrier. Non-limiting examples are microplates, PVDF or nitrocellulose blotting membranes.
[0246] (iv) bringing the antigen of interest in contact with antibodies bearing the DUF2121 recognition motif and the detectable maker
[0247] (v) detecting the antigen levels via the detectable maker

[0248] Depending on the methods used, a detectable marker may comprise a reporter enzyme, a fluorophore and/or a radioactive isotope. Suitable reporter enzymes and how to detect them are well known in the art. Non-limiting examples are alkaline phosphatase, horseradish peroxidase or luciferase enzymes. Suitable fluorophores and how to detect them are well known in the art. Non-limiting examples are Alexa Fluors, Bodipy dyes, Qdot probes, Fluorescein derivatives, fluorescent proteins, cyanine fluorophores or IRDyes, such as Alexa Fluor 750, Cy 7.5, Cy 5.5 or IRDye 800 fluorophores. Said fluorophores may be detected via fluorescence imaging. Suitable radioactive isotopes and how to detect them are well known in the art. Non-limiting examples are [³²P]phosphorus, [³³P]phosphorus [³⁵S]sulfur, [3H]hydrogen, [¹²⁵I]iodide, [¹²³I]iodide, or [¹³¹I]iodide.

[0249] It is also envisaged that the polypeptide of the present invention is used for production of a circular polypeptide (FIG. 16 I). Circular polypeptides are exceptionally useful in therapeutic applications, due to their increased stability (van 't Hof (2015) Biol Chem 396:283-93).

[0250] Accordingly, the present invention further relates to a method for producing a circular polypeptide comprising producing the circular polypeptide by bringing the polypeptide of the present invention into contact with a substrate polypeptide and reacting the substrate polypeptide.

[0251] Said method may further comprise producing a circular polypeptide.

[0252] In the inventive method for producing a circular polypeptide circularization may be generated between via the formation of a peptide bond between two residues of the substrate polypeptide.

[0253] The circularization of the substrate polypeptide may be generated by a peptide bond between residues of two DUF2121 recognition motifs.

[0254] Accordingly, in the inventive method for producing a circular polypeptide the substrate polypeptide may comprise two DUF2121 recognition motifs in a distance sufficient to allow circularization of the sequence.

[0255] In the inventive method for producing a circular polypeptide the circularization of the substrate polypeptide may be generated via the formation of a peptide bond between the proline residue of the first DUF2121 recognition motif in position 3 of SEQ ID NOs: 308, 309, 310 and 311, respectively, and the aspartate residue of the second DUF2121 recognition motif in position 2 of SEQ ID NOs: 308, 309, 310 and 311, respectively.

[0256] The circularization of the substrate polypeptide may be generated by a peptide bond between the N-terminal amino acid and an amino acid of an internal DUF2121 recognition motif.

[0257] In the inventive method for producing a circular polypeptide the substrate polypeptide may comprise at its N-terminus the C-terminal portion of the DUF2121 recognition motif, said C-terminal portion of the DUF2121 recognition motif starting with the amino acid residues as defined in positions 3 to 5 of any one of SEQ ID NOs: 308, 309, 310 and 311 and further a DUF2121 recognition motif comprising any one of SEQ ID NOs: 308, 309, 310 and 311 in a distance to the N-terminus sufficient to allow circularization

[0258] In the inventive method for producing a circular polypeptide the substrate polypeptide may comprise at its N-terminus the C-terminal portion of the DUF2121 recognition motif, said C-terminal portion of the DUF2121 recognition motif starting with the amino acid residues as defined in positions 3 to 5 of any one of SEQ ID NOs: 308, 309, 310 and 311 and further a DUF2121 recognition motif comprising any one of SEQ ID NOs: 308, 309, 310 and 311 in a distance to the N-terminus sufficient to allow circularization and the circularization of the substrate polypeptide may be generated via the formation of a peptide bond between the N-terminal amino acid and the aspartate residue of the DUF2121 recognition motif in position 2 of SEQ ID NOs: 308, 309, 310 and 311, respectively.

[0259] When the inventive method provided herein is used to produce a circular polypeptide the DUF2121 recognition motif may comprise additional amino acids.

[0260] Accordingly, in the inventive method for producing a circular polypeptide the DUF2121 recognition motif may comprise at least 1, preferably at least 2, even more preferably at least 3, even more preferably at least 4, even more preferably at least 5, even more preferably at least 6, even more preferably at least 7, even more preferably at least 8, even more preferably at least 9, even more preferably at least 10 and most preferably at least 15 amino acids N-terminally of SEQ ID NOs: 308, 309, 310 and 311, respectively.

[0261] In the inventive method for producing a circular polypeptide the DUF2121 recognition motif may comprise at least 1, preferably at least 2, even more preferably at least 3, even more preferably at least 4, even more preferably at least 5, even more preferably at least 6, even more preferably at least 7, even more preferably at least 8, even more preferably at least 9, even more preferably at least 10 and most preferably at least 15 amino acids C-terminally of SEQ ID NOs: 308, 309, 310 and 311, respectively.

[0262] As mentioned above a DUF2121 recognition motif comprising at least 20 amino acids C-terminally of SEQ ID NOs: 308, 309, 310 and 311, respectively, may be particularly preferred. Thus, in the inventive method for producing a circular polypeptide the DUF2121 recognition motif may comprise at least 10, at least 15 or at least 20 amino acids C-terminally of SEQ ID NOs: 308, 309, 310 and 311, respectively.

[0263] In the inventive method for producing a circular polypeptide the DUF2121 recognition motif may comprise at least 5 amino acids N-terminally and at least 10 amino acids C-terminally of SEQ ID NOs: 308, 309, 310 and 311, respectively.

[0264] In the inventive method for producing a circular polypeptide the DUF2121 recognition motif may comprise at least 5 amino acids N-terminally and at least 15 amino acids C-terminally of SEQ ID NOs: 308, 309, 310 and 311, respectively.

[0265] In the inventive method for producing a circular polypeptide the DUF2121 recognition motif may comprise at least 5 amino acids N-terminally and at least 20 amino acids C-terminally of SEQ ID NOs: 308, 309, 310 and 311, respectively.

[0266] In the inventive method for producing a circular polypeptide the DUF2121 recognition motif may comprise a sequence identical to or at least 20%, preferably at least 30%, even more preferably at least 40%, even more preferably at least 50%, even more preferably at least 60%, even more preferably at least 70%, even more preferably at least 80%, even more preferably at least 90%, even more preferably at least 95% and most preferably at least 99% identical to a sequence as defined by position(s) 1 to 15, 2 to 15, 3 to 15, 4 to 15, 5 to 15, 6 to 15, 7 to 15, 8 to 15, 9 to 15, 10 to 15, 11 to 15, 12 to 15, 13 to 15, 14 to 15 or 15 of any one of SEQ ID NOs: 315-366, 460-510 and 551-661 N-terminally, preferably directly N-terminally of SEQ ID NOs: 308, 309, 310 and 311, respectively.

[0267] In the inventive method for producing a circular polypeptide DUF2121 recognition motif may comprise a sequence identical to or at least 20%, preferably at least 30%, even more preferably at least 40%, even more preferably at least 50%, even more preferably at least 60%, even more preferably at least 70%, even more preferably at least 80%, even more preferably at least 90%, even more preferably at least 95% and most preferably at least 99% identical to a sequence as defined by position(s) 21 to 30, 21 to 29, 21 to 28, 21 to 27, 21 to 26, 21 to 25, 21 to 24, 21 to 23, 21 to 22 or 21 of any one of SEQ ID NOs: 315-366, 460-510 and 551-661C-terminally, preferably directly C-terminally of SEQ ID NOs: 308, 309, 310 and 311, respectively.

[0268] It is also possible in the inventive method for producing a circular polypeptide that the DUF2121 recognition motif may comprise a sequence identical to or at least 20%, preferably at least 30%, even more preferably at least 40%, even more preferably at least 50%, even more preferably at least 60%, even more preferably at least 70%, even more preferably at least 80%, even more preferably at least 90%, even more preferably at least 95% and most preferably at least 99% identical to a sequence as defined by position(s) 21 to 40, 21 to 39, 21 to 38, 21 to 37, 21 to 36, 21 to 35, 21 to 34, 21 to 33, 21 to 32, 21 to 31 of any one of SEQ ID NOs: 551-661 C-terminally, preferably directly C-terminally of SEQ ID NOs: 308, 309, 310 and 311, respectively.

[0269] Thus, in the inventive method for producing a circular polypeptide DUF2121 recognition motif may comprise a sequence identical to or at least 20%, preferably at least 30%, even more preferably at least 40%, even more preferably at least 50%, even more preferably at least 60%, even more preferably at least 70%, even more preferably at least 80%, even more preferably at least 90%, even more preferably at least 95% and most preferably at least 99% identical to a sequence as defined by position(s) 21 to 30, 21 to 29, 21 to 28, 21 to 27, 21 to 26, 21 to 25, 21 to 24, 21 to 23, 21 to 22 or 21 of any one of SEQ ID NOs: 315-366, 460-510 and 551-661C-terminally, preferably directly C-terminally of SEQ ID NOs: 308, 309, 310 and 311, respectively, and/or may comprise a sequence identical to or at least 20%, preferably at least 30%, even more preferably at least 40%, even more preferably at least 50%, even more preferably at least 60%, even more preferably at least 70%, even more preferably at least 80%, even more preferably at least 90%, even more preferably at least 95% and most preferably at least 99% identical to a sequence as defined by position(s) 21 to 40, 21 to 39, 21 to 38, 21 to 37, 21 to 36, 21 to 35, 21 to 34, 21 to 33, 21 to 32, 21 to 31 of any one of SEQ ID NOs: 551-661 C-terminally, preferably directly C-terminally of SEQ ID NOs: 308, 309, 310 and 311, respectively.

[0270] In the inventive method for producing a circular polypeptide the DUF2121 recognition motif may consist of the sequence as defined in any one of SEQ ID NOs: 315-366, 460-510 and 551-661 or a sequence having or at least 20%, preferably at least 30%, even more preferably at least 40%, even more preferably at least 50%, even more preferably at least 60%, even more preferably at least 70%, even more preferably at least 80%, even more preferably at least 90%, even more preferably at least 95% and most preferably at least 99% sequence identity to said sequence.

[0271] In the inventive method for producing a circular polypeptide the C-terminal portion of the DUF2121 recognition motif may comprise at least 1, preferably at least 2, even more preferably at least 3, even more preferably at least 4, even more preferably at least 5, even more preferably at least 6, even more preferably at least 7, even more preferably at least 8, even more preferably at least 9, even more preferably at least 10 and most preferably at least 15 amino acids C-terminally, preferably directly C-terminally of the N-terminal amino acids as defined by positions 3 to 5 of SEQ ID NOs: 308, 309, 310 and 311, respectively.

[0272] A C-terminal portion of the DUF2121 recognition motif comprising at least 20 amino acids C-terminally, preferably directly C-terminally of the N-terminal amino acids as defined by positions 3 to 5 of SEQ ID NOs: 308, 309, 310 and 311, respectively, may be particularly preferred.

[0273] Thus, in the inventive method for producing a circular polypeptide the C-terminal portion of the DUF2121 recognition motif may comprise at least 10, at least 15 or at least 20 amino acids C-terminally, preferably directly C-terminally of the N-terminal amino acids as defined by positions 3 to 5 of SEQ ID NOs: 308, 309, 310 and 311, respectively.

[0274] In the inventive method for producing a circular polypeptide the C-terminal portion of the DUF2121 recognition motif may comprise a sequence identical to or at least 20%, preferably at least 30%, even more preferably at least 40%, even more preferably at least 50%, even more preferably at least 60%, even more preferably at least 70%, even more preferably at least 80%, even more preferably at least 90%, even more preferably at least 95% and most preferably at least 99% identical to a sequence as defined by position(s) 21 to 30, 21 to 29, 21 to 28, 21 to 27, 21 to 26, 21 to 25, 21 to 24, 21 to 23, 21 to 22 or 21 of any one of SEQ ID NOs: 315-366, 460-510 and 551-661 C-terminally, preferably directly C-terminally of the N-terminal amino acids as defined by positions 3 to 5 of SEQ ID NOs: 308, 309, 310 and 311, respectively.

[0275] It is also envisaged in the inventive method for producing a circular polypeptide that the C-terminal portion of the DUF2121 recognition motif may comprise a sequence identical to or at least 20%, preferably at least 30%, even more preferably at least 40%, even more preferably at least 50%, even more preferably at least 60%, even more preferably at least 70%, even more preferably at least 80%, even more preferably at least 90%, even more preferably at least 95% and most preferably at least 99% identical to a sequence as defined by position(s) 21 to 40, 21 to 39, 21 to 38, 21 to 37, 21 to 36, 21 to 35, 21 to 34, 21 to 33, 21 to 32, 21 to 31 ofany one of SEQ ID NOs: 551-661 C-terminally, preferably directly C-terminally of the N-terminal amino acids as defined by positions 3 to 5 of SEQ ID NOs: 308, 309, 310 and 311, respectively.

[0276] Thus, the inventive method for producing a circular polypeptide the C-terminal portion of the DUF2121 recognition motif may comprise a sequence identical to or at least 20%, preferably at least 30%, even more preferably at least 40%, even more preferably at least 50%, even more preferably at least 60%, even more preferably at least 70%, even more preferably at least 80%, even more preferably at least 90%, even more preferably at least 95% and most preferably at least 99% identical to a sequence as defined by position(s) 21 to 30, 21 to 29, 21 to 28, 21 to 27, 21 to 26, 21 to 25, 21 to 24, 21 to 23, 21 to 22 or 21 of any one of SEQ ID NOs: 315-366, 460-510 and 551-661 C-terminally, preferably directly C-terminally of the N-terminal amino acids as defined by positions 3 to 5 of SEQ ID NOs: 308, 309, 310 and 311, respectively, and/or may comprise a sequence identical to or at least 20%, preferably at least 30%, even more preferably at least 40%, even more preferably at least 50%, even more preferably at least 60%, even more preferably at least 70%, even more preferably at least 80%, even more preferably at least 90%, even more preferably at least 95% and most preferably at least 99% identical to a sequence as defined by position(s) 21 to 40, 21 to 39, 21 to 38, 21 to 37, 21 to 36, 21 to 35, 21 to 34, 21 to 33, 21 to 32, 21 to 31 of any one of SEQ ID NOs: 551-661 C-terminally, preferably directly C-terminally of the N-terminal amino acids as defined by positions 3 to 5 of SEQ ID NOs: 308, 309, 310 and 311, respectively.

[0277] In the inventive method for producing a circular polypeptide the C-terminal portion of the DUF2121 recognition motif may consist of the amino acid sequence as defined in positions 16 to 30 of any one of SEQ ID NOs: 315-366, 460-510 and 551-661 or an amino acid sequence having at least 20%, preferably at least 30%, even more preferably at least 40%, even more preferably at least 50%, even more preferably at least 60%, even more preferably at least 70%, even more preferably at least 80%, even more preferably at least 90%, even more preferably at least 95% and most preferably at least 99% sequence identity to said sequence.

[0278] It is also envisaged in the inventive method for producing a circular polypeptide that the C-terminal portion of the DUF2121 recognition motif may consist of the amino acid sequence as defined in positions 16 to 35 of any one of SEQ ID NOs: 551-661 or an amino acid sequence having at least 20%, preferably at least 30%, even more preferably at least 40%, even more preferably at least 50%, even more preferably at least 60%, even more preferably at least 70%, even more preferably at least 80%, even more preferably at least 90%, even more preferably at least 95% and most preferably at least 99% sequence identity to said sequence.

[0279] It is also envisaged in the inventive method for producing a circular polypeptide that the C-terminal portion of the DUF2121 recognition motif may consist of the amino acid sequence as defined in positions 16 to 40 of any one of SEQ ID NOs: 551-661 or an amino acid sequence having at least 20%, preferably at least 30%, even more preferably at least 40%, even more preferably at least 50%, even more preferably at least 60%, even more preferably at least 70%, even more preferably at least 80%, even more preferably at least 90%, even more preferably at least 95% and most preferably at least 99% sequence identity to said sequence.

[0280] The invention further relates to the fusion polypeptides obtained or obtainable by the method for producing a fusion polypeptide as described herein and to the circular polypeptide obtained or obtainable by the method for producing a circular polypeptide as described herein.

[0281] Of course, the invention also relates to the isolated fusion polypeptides obtained or obtainable by the method for producing a fusion polypeptide as described herein and to the isolated circular polypeptide obtained or obtainable by the method for producing a circular polypeptide as described herein.

[0282] The fusion polypeptides and the circular polypeptides produced by the methods of the present invention can be used for pharmaceutical or diagnostical purposes. Accordingly, the invention relates to the use of said fusion polypeptide or circular polypeptide in the prevention, treatment or amelioration of a disease. In other words, the invention relates to the use of said fusion polypeptide or circular polypeptide as a medicament. It is also envisaged that the fusion polypeptides or the circular polypeptides produced by the present invention form part of a composition. Said composition may comprise one or more of the fusion polypeptides or the circular polypeptide produced by the present invention. Said composition may be a pharmaceutical composition optionally further comprising a pharmaceutically acceptable carrier and/or diluent. Said composition may be used for pharmaceutical or diagnostical purposes. Accordingly, the invention relates to the use of a pharmaceutical composition comprising the fusion polypeptide or circular polypeptide produced by the invention in the prevention, treatment or amelioration of a disease. In other words the invention relates to the use of a pharmaceutical composition comprising the fusion polypeptide or circular polypeptide produced by the invention as a medicament. However, the fusion polypeptides produced by the methods of the present invention are also useful in certain other industrial areas, like in the food industry, the beverage industry, the cosmetic industry, the oil industry, the paper industry and the like.

[0283] Fusion polypeptides are interesting for pharmaceutical or diagnostical purposes because of their ability to extend protein and peptide drug lifetimes. By fusing biologically active proteins or peptides with a long half-life protein, the resulting fusion protein can have a significantly longer lifetime than that of the original drug. It is envisaged that the inventive polypeptide and the inventive method described herein may be used to create fusion proteins including but not limited to fusions of a pharmaceutically active protein/polypeptide with an antibody Fc fragment, with recombinant serum albumin, with transferrin, with carboxy-terminal peptide, with XTEN or elastin-like-peptide.

TABLE 1
Adriase proteins, their recognition motifs and organismal growth conditions.

| | | | | Secondary* | Secondary* | | | | |
|---|---|---|---|---|---|---|---|---|---|
| | | Adriase | Adriase | Adriase | Adriase | | | | |
| | | 15 × 10 | 15 × 20 | 15 × 10 | 15 × 20 | Max. | Optimal | | |
| | Adriase | recognition | recognition | recognition | recognition | growth | growth | Optimal | Additional |
| | SEQ | motif SEQ | motif SEQ | motif SEQ | motif SEQ | temperature | NaCl | growth | growth |
| Species | ID NO | ID NO | ID NO | ID NO | ID NO | [° C.] | [mM] | pH | requirements |
| Candidatus | 99 | 324 | 551 | — | | n.d. | n.d. | n.d. | n.d. |
| Methanoperedens sp. | | | | | | | | | |
| BLZ2 | | | | | | | | | |
| Methanobacteriaceae | 215 | 364 | 552 | — | | n.d. | n.d. | n.d. | n.d. |
| archaeon 41_258 | | | | | | | | | |
| Methanobacteriales | 219 | 463 | 553 | — | | n.d. | n.d. | n.d. | n.d. |
| archaeon HGW- | | | | | | | | | |
| Methanobacteriales-1 | | | | | | | | | |
| Methanobacteriales | 195 | 485 | 554 | — | | n.d. | n.d. | n.d. | n.d. |
| archaeon HGW- | | | | | | | | | |
| Methanobacteriales-2 | | | | | | | | | |
| Methanobacterium | 211 | 474 | 555 | — | | n.d. | n.d. | n.d. | n.d. |
| arcticum | | | | | | | | | |
| Methanobacterium | 210 | 474 | 555 | 475 | 649 | 50 | 0.00 | 6.8-7.2 | n.d. |
| bryantii | | | | | | | | | |
| Methanobacterium | 217 | 496 | 556 | — | | 50 | n.d. | 6.3-6.8 | n.d. |
| congolense | | | | | | | | | |
| Methanobacterium | 199 | 469 | 557 | — | | 50 | n.d. | 6.9-7.4 | n.d. |
| formicicum | | | | | | | | | |
| Methanobacterium | 203 | 469 | 557 | — | | 50 | n.d. | 6.9-7.4 | n.d. |
| formicicum | | | | | | | | | |
| (GCF_001458655.1) | | | | | | | | | |
| Methanobacterium | 202 | 469 | 557 | — | | 50 | n.d. | 6.9-7.4 | n.d. |
| formicicum BRM9 | | | | | | | | | |
| (GCA_000762265.1) | | | | | | | | | |
| Methanobacterium | 201 | 469 | 557 | — | | 50 | n.d. | 6.9-7.4 | n.d. |
| formicicum BRM9 | | | | | | | | | |
| (GCF_000762265.1) | | | | | | | | | |
| Methanobacterium | 207 | 469 | 643 | — | | 50 | n.d. | 6.9-7.4 | n.d. |
| formicicum DSM 3637 | | | | | | | | | |
| Methanobacterium | 200 | 469 | 557 | — | | 50 | n.d. | 6.9-7.4 | n.d. |
| formicicum DSM1535 | | | | | | | | | |
| Methanobacterium | 204 | 469 | 557 | — | | 50 | n.d. | 6.9-7.4 | n.d. |
| formicicum MB9 | | | | | | | | | |
| Methanobacterium | 193 | 358 | 558 | — | | 41 | n.d. | 7 | acetate, yeast |
| lacus | | | | | | | | | extract, |
| | | | | | | | | | trypticase |
| Methanobacterium | 216 | 360 | 559 | — | | n.d. | n.d. | n.d. | n.d. |
| paludis | | | | | | | | | |
| Methanobacterium sp. | 209 | 492 | 560 | — | | n.d. | n.d. | n.d. | n.d. |
| Methanobacterium sp. | 218 | 472 | 561 | — | | n.d. | n.d. | n.d. | n.d. |
| BAmetb10 | | | | | | | | | |
| Methanobacterium sp. | 205 | 469 | 562 | — | | n.d. | n.d. | n.d. | n.d. |
| BAmetb5 | | | | | | | | | |
| Methanobacterium sp. | 212 | 464 | 563 | — | | n.d. | n.d. | n.d. | n.d. |
| BRmetb2 | | | | | | | | | |
| Methanobacterium sp. | 206 | 465 | 554 | 466 | 646 | n.d. | n.d. | n.d. | n.d. |
| Maddingley MBC34 | | | | | | | | | |
| Methanobacterium sp. | 198 | 469 | 564 | — | | n.d. | n.d. | n.d. | n.d. |
| MB1 | | | | | | | | | |
| (GCA_000499765.1) | | | | | | | | | |
| Methanobacterium sp. | 197 | 469 | 564 | — | | n.d. | n.d. | n.d. | n.d. |
| MB1 | | | | | | | | | |
| (GCF_000499765.1) | | | | | | | | | |
| Methanobacterium sp. | 194 | 465 | 565 | 467 | 647 | n.d. | n.d. | n.d. | n.d. |
| PtaB.Bin024 | | | | | | | | | |
| Methanobacterium sp. | 208 | 461 | 566 | 462 | 645 | n.d. | n.d. | n.d. | n.d. |
| PtaU1.Bin097 | | | | | | | | | |
| Methanobacterium sp. | 192 | 357 | 567 | — | | n.d. | n.d. | n.d. | n.d. |
| SMA-27 | | | | | | | | | |
| Methanobacterium | 196 | 465 | 554 | 468 | 648 | 40 | 0.00 | 7 | n.d. |
| subterraneum | | | | | | | | | |
| Methanobrevibacter | 184 | 365 | 568 | — | | 45 | n.d. | 7 | acetate, yeast |
| arboriphilus | | | | | | | | | extract, |
| | | | | | | | | | trypticase |
| Methanobrevibacter | 185 | 473 | 569 | — | | 45 | n.d. | 7 | acetate, yeast |
| arboriphilus DSM 1125 | | | | | | | | | extract, |
| | | | | | | | | | trypticase |
| Methanobrevibacter | 175 | 510 | 570 | — | | n.d. | n.d. | 7 | acetate, yeast |
| boviskoreani | | | | | | | | | extract, |
| | | | | | | | | | trypticase, |
| | | | | | | | | | coenzyme M, |
| | | | | | | | | | branched-chain |
| Methanobrevibacter | 171 | 359 | 571 | — | | 30 | 0.17 | 7.2 | acetate |
| curvatus | | | | | | | | | |
| Methanobrevibacter | 178 | 460 | 572 | — | | 33.5 | 0.86 | 7.6 | acetate |
| filiformis | | | | | | | | | |
| Methanobrevibacter | 189 | 479 | 573 | — | | n.d. | 0.05 | 7-7.2 | n.d. |
| gottschalkii | | | | | | | | | |
| Methanobrevibacter | 187 | 353 | 574 | — | | 43 | 1.4-1.9 | 9-9.5 | n.d. |
| millerae | | | | | | | | | |
| Methanobrevibacter | 172 | 361 | 575 | — | | 42 | 0.17 | 7 | acetate |
| olleyae | | | | | | | | | |
| Methanobrevibacter | 188 | 353 | 576 | — | | 39 | 0.09 | 6.7 | acetate |
| oralis | | | | | | | | | |
| Methanobrevibacter | 173 | 363 | 577 | — | | n.d. | 0.51 | 6.5 | n.d. |
| ruminantium | | | | | | | | | |
| Methanobrevibacter | 179 | 352 | 578 | — | | n.d. | 0.51 | 6.5 | n.d. |
| smithii | | | | | | | | | |
| Methanobrevibacter | 181 | 352 | 578 | — | | n.d. | 0.51 | 6.5 | n.d. |
| smithii ATCC 35061 | | | | | | | | | |
| Methanobrevibacter | 180 | 352 | 578 | — | | n.d. | 0.51 | 6.5 | n.d. |
| smithii CAG: 186 | | | | | | | | | |
| Methanobrevibacter | 182 | 352 | 578 | — | | n.d. | 0.51 | 6.5 | n.d. |
| smithii DSM 2374 | | | | | | | | | |
| Methanobrevibacter sp. | 177 | 362 | 579 | — | | n.d. | n.d. | n.d. | n.d. |
| 87.7 | | | | | | | | | |
| Methanobrevibacter sp. | 174 | 510 | 570 | — | | n.d. | n.d. | n.d. | n.d. |
| AbM4 | | | | | | | | | |
| Methanobrevibacter sp. | 183 | 365 | 580 | — | | n.d. | n.d. | n.d. | n.d. |
| NOE | | | | | | | | | |
| Methanobrevibacter sp. | 191 | 351 | 581 | 477 | 652 | n.d. | n.d. | n.d. | n.d. |
| YE315 | | | | | | | | | |
| Methanobrevibacter | 190 | 351 | 582 | 477 | 651 | n.d. | n.d. | 6 | rumen fluid, |
| thaueri | | | | | | | | | acetate, |
| | | | | | | | | | aminoacids |
| Methanobrevibacter | 186 | 354 | 583 | — | | n.d. | n.d. | 7.5-8 | Vitamins |
| woesei | | | | | | | | | |
| Methanobrevibacter | 176 | 362 | 584 | 476 | 650 | n.d. | 0.43 | 6.5 | n.d. |
| wolinii | | | | | | | | | |
| Methanocaldococcus | 160 | 505 | 585 | — | | n.d. | n.d. | n.d. | n.d. |
| bathoardescens | | | | | | | | | |
| Methanocaldococcus | 157 | 348 | 586 | — | | 92 | 0.50 | 6 | NaCl, Na2S, |
| fervens AG86 | | | | | | | | | |
| Methanocaldococcus | 154 | 343 | 587 | — | | 91 | 0.43 | 6.5 | n.d. |
| infernus ME | | | | | | | | | |
| Methanocaldococcus | 159 | 346 | 588 | — | | 85 | 0.43 | 6.5 | n.d. |
| jannaschii DSM 2661 | | | | | | | | | |
| Methanocaldococcus | 158 | 344 | 589 | — | | n.d. | n.d. | n.d. | n.d. |
| sp. FS406-22 | | | | | | | | | |
| Methanocaldococcus | 155 | 347 | 590 | — | | 90 | 0.00 | 7 | acetate |
| villosus KIN24-T80 | | | | | | | | | |
| Methanocaldococcus | 156 | 345 | 591 | — | | 89 | 0.00 | 6.8 | acetate |
| vulcanius M7 | | | | | | | | | |
| Methanococcales | 150 | 478 | 592 | — | | n.d. | n.d. | n.d. | n.d. |
| archaeon HHB | | | | | | | | | |
| Methanococcus | 147 | 340 | 593 | 504 | 660 | 50 | n.d. | 7 | acetate |
| aeolicus Nankai-3 | | | | | | | | | |
| Methanococcus | 165 | 341 | 594 | — | | 85 | 0.3-0.4 | 6.3-7.5 | n.d. |
| maripaludis | | | | | | | | | |
| Methanococcus | 162 | 480 | 595 | — | | 85 | 0.3-0.4 | 6.3-7.5 | n.d. |
| maripaludis C5 | | | | | | | | | |
| Methanococcus | 163 | 501 | 596 | 502 | 659 | 85 | 0.3-0.4 | 6.3-7.5 | n.d. |
| maripaludis C6 | | | | | | | | | |
| Methanococcus | 164 | 499 | 597 | 500 | 658 | 85 | 0.3-0.4 | 6.3-7.5 | n.d. |
| maripaludis C7 | | | | | | | | | |
| Methanococcus | 169 | 341 | 594 | — | | 85 | 0.3-0.4 | 6.3-7.5 | n.d. |
| maripaludis KA1 | | | | | | | | | |
| Methanococcus | 168 | 341 | 594 | — | | 85 | 0.3-0.4 | 6.3-7.5 | n.d. |
| maripaludis OS7 | | | | | | | | | |
| Methanococcus | 167 | 503 | 598 | — | | 85 | 0.3-0.4 | 6.3-7.5 | n.d. |
| maripaludis S2 | | | | | | | | | |
| Methanococcus | 166 | 341 | 594 | — | | 85 | 0.3-0.4 | 6.3-7.5 | n.d. |
| maripaludis X1 | | | | | | | | | |
| Methanococcus | 161 | 349 | 599 | — | | n.d. | n.d. | n.d. | n.d. |
| vannielii SB | | | | | | | | | |
| Methanococcus voltae | 146 | 339 | 600 | — | | 45 | 0.24-0.64 | 7-7.5 | n.d. |
| A3 | | | | | | | | | |
| Methanoculleus | 130 | 319 | 601 | — | | 50 | 0.00 | 7 | n.d. |
| bourgensis | | | | | | | | | |
| Methanoculleus | 129 | 319 | 601 | 494 | 657 | 50 | 0.00 | 7 | n.d. |
| bourgensis MAB1 | | | | | | | | | |
| Methanoculleus | 128 | 319 | 601 | — | | 50 | 0.00 | 7 | n.d. |
| bourgensis MS2 | | | | | | | | | |
| Methanoculleus | 138 | 482 | 602 | — | | 40 | 0.00 | 7 | acetate, yeast |
| chikugoensis | | | | | | | | | extract, peptone, |
| | | | | | | | | | heavy metal |
| | | | | | | | | | solution |
| Methanoculleus | 139 | 316 | 603 | — | | 45 | 0.3-0.5 | n.d. | acetate, yeast |
| horonobensis | | | | | | | | | extract |
| Methanoculleus | 136 | 317 | 604 | — | | 48 | 0.46 | 6.8-7.2 | yeast extract, |
| marisnigri JR1 | | | | | | | | | acetate, |
| Methanoculleus | 135 | 317 | 605 | — | | 50 | n.d. | 7.5-7.9 | acetate |
| sediminis | | | | | | | | | |
| Methanoculleus sp. | 131 | 495 | 606 | — | | n.d. | n.d. | n.d. | n.d. |
| MAB1 | | | | | | | | | |
| (GCA_900036045.1) | | | | | | | | | |
| Methanoculleus sp. | 137 | 317 | 605 | 484 | 653 | n.d. | n.d. | n.d. | n.d. |
| MH98A | | | | | | | | | |
| Methanoculleus sp. | 98 | 332 | 607 | 486 | 654 | n.d. | n.d. | n.d. | n.d. |
| SDB | | | | | | | | | |
| Methanoculleus | 96 | 488 | 608 | 489 | 656 | n.d. | n.d. | n.d. | n.d. |
| taiwanensis | | | | | | | | | |
| Methanoculleus | 127 | 318 | 609 | — | | 65 | 0.4-1.1 | 6-6.6 | acetate, |
| thermophilus | | | | | | | | | thiamine, |
| | | | | | | | | | riboflavin, |
| | | | | | | | | | vitamin B12, |
| | | | | | | | | | peptones |
| Methanofervidicoccus | 149 | 478 | 592 | — | | n.d. | n.d. | n.d. | n.d. |
| abyssi HHB | | | | | | | | | |
| Methanofollis | 97 | 315 | 610 | — | | 40 | 0.34 | 6.4-7.3 | acetate/ethanol, |
| ethanolicus | | | | | | | | | aminobenzoate, |
| | | | | | | | | | biotin, B12, |
| | | | | | | | | | tungsten |
| Methanolinea sp. SDB | 126 | 317 | 611 | — | | n.d. | n.d. | n.d. | n.d. |
| Methanolinea tarda | 142 | 320 | 612 | — | | 55 | n.d. | n.d. | n.d. |
| Methanomicrobiales | 134 | n.d. | — | — | | n.d. | n.d. | n.d. | n.d. |
| archaeon HGW- | | | | | | | | | |
| Methanomicrobiales2 | | | | | | | | | |
| Methanomicrobiales | 133 | n.d. | — | — | | n.d. | n.d. | n.d. | n.d. |
| archaeon HGW- | | | | | | | | | |
| Methanomicrobiales-6 | | | | | | | | | |
| Methanopyrus kandleri | 145 | 338 | 613 | — | | 110 | 0.50 | 7 | n.d. |
| AV19 | | | | | | | | | |
| Methanopyrus sp. | 144 | 338 | 613 | — | | n.d. | n.d. | n.d. | n.d. |
| KOL6 | | | | | | | | | |
| Methanoregulaceae | 143 | n.d. | — | — | | n.d. | n.d. | n.d. | n.d. |
| archaeon PtaB.Bin152 | | | | | | | | | |
| Methanoregulaceae | 141 | 481 | 614 | — | | n.d. | n.d. | n.d. | n.d. |
| archaeon PtaU1.Bin059 | | | | | | | | | |
| Methanoregulaceae | 140 | n.d. | — | — | | n.d. | n.d. | n.d. | n.d. |
| archaeon PtaU1.Bin066 | | | | | | | | | |
| Methanosaeta | 95 | 321 | 615 | — | | 45 | 0.6-2.5 | 6.5-7.4 | n.d. |
| harundinacea | | | | | | | | | |
| Methanosaeta sp. | 88 | n.d. | — | — | | n.d. | n.d. | n.d. | n.d. |
| ASM2 | | | | | | | | | |
| Methanosaeta sp. | 87 | n.d. | — | — | | n.d. | n.d. | n.d. | n.d. |
| ASO1 | | | | | | | | | |
| Methanosaeta sp. | 89 | n.d. | — | — | | n.d. | n.d. | n.d. | n.d. |
| NSM2 | | | | | | | | | |
| Methanosaeta sp. | 94 | 509 | 616 | — | | n.d. | n.d. | n.d. | n.d. |
| PtaB.Bin087 | | | | | | | | | |
| Methanosaeta sp. | 91 | 491 | 617 | — | | n.d. | n.d. | n.d. | n.d. |
| PtaU1.Bin112 | | | | | | | | | |
| Methanosaeta sp. SDB | 93 | n.d. | — | | | n.d. | n.d. | n.d. | n.d. |
| Methanosarcina | 104 | 335 | 618 | — | | 50 | 2-2.5 | 7.5 | n.d. |
| acetivorans C2A | | | | | | | | | |
| Methanosarcina | 118 | 329 | 619 | — | | n.d. | 0.5-2 | 6.5-7.5 | n.d. |
| barkeri CM1 | | | | | | | | | |
| Methanosarcina | 119 | 493 | 620 | — | | n.d. | 0.5-2 | 6.5-7.5 | n.d. |
| barkeri 3 | | | | | | | | | |
| Methanosarcina | 120 | 329 | 619 | — | | n.d. | 0.5-2 | 6.5-7.5 | n.d. |
| barkeri str. Fusaro | | | | | | | | | |
| Methanosarcina | 115 | 326 | 621 | — | | 50 | 0.15 | 7 | acetate |
| flavescens | | | | | | | | | |
| Methanosarcina | 102 | 336 | 622 | 487 | 655 | 42 | 0.00 | 7 | n.d. |
| horonobensis | | | | | | | | | |
| Methanosarcina | 103 | 337 | 623 | — | | 35 | 0.00 | 7 | acetate, yeast |
| lacustris Z-7289 | | | | | | | | | extract |
| Methanosarcina mazei | 106 | 328 | 624 | — | | 45 | 0.50 | 7.2 | n.d. |
| Methanosarcina mazei | 107 | 328 | 624 | — | | 45 | 0.50 | 7.2 | n.d. |
| C16 | | | | | | | | | |
| Methanosarcina mazei | 108 | 327 | 624 | — | | 45 | 0.50 | 7.2 | n.d. |
| Go1 | | | | | | | | | |
| Methanosarcina siciliae | 105 | 333 | 625 | — | | 50 | 0.48 | 8.2-9.2 | biotin, thiamine |
| Methanosarcina siciliae | 122 | 328 | 624 | — | | 50 | 0.48 | 8.2-9.2 | biotin, thiamine |
| C2 | | | | | | | | | |
| Methanosarcina sp. | 113 | 490 | 626 | — | | n.d. | n.d. | n.d. | n.d. |
| 1.H.A.2.2 | | | | | | | | | |
| Methanosarcina sp. | 111 | 331 | 627 | — | | n.d. | n.d. | n.d. | n.d. |
| 1.H.T.1A.1 | | | | | | | | | |
| Methanosarcina sp. | 112 | 490 | 626 | — | | n.d. | n.d. | n.d. | n.d. |
| 2.H.A.1B.4 | | | | | | | | | |
| Methanosarcina sp. | 110 | 331 | 627 | — | | n.d. | n.d. | n.d. | n.d. |
| 2.H.T.1A.3 | | | | | | | | | |
| Methanosarcina sp. | 101 | 334 | 628 | — | | n.d. | n.d. | n.d. | n.d. |
| Ant1 | | | | | | | | | |
| Methanosarcina sp. | 123 | 327 | 629 | — | | n.d. | n.d. | n.d. | n.d. |
| Kolksee | | | | | | | | | |
| (GCA_000969945.1) | | | | | | | | | |
| Methanosarcina sp. | 125 | 327 | 629 | — | | n.d. | n.d. | n.d. | n.d. |
| Kolksee | | | | | | | | | |
| (GCF_000969945.1) | | | | | | | | | |
| Methanosarcina sp. | 114 | 328 | 630 | — | | n.d. | n.d. | n.d. | n.d. |
| MSH10X1 | | | | | | | | | |
| Methanosarcina sp. | 100 | 330 | 631 | — | | n.d. | n.d. | n.d. | n.d. |
| MTP4 | | | | | | | | | |
| Methanosarcina sp. | 109 | 337 | 632 | — | | n.d. | n.d. | n.d. | n.d. |
| WWM596 | | | | | | | | | |
| Methanosarcina spelaei | 121 | 327 | 629 | — | | 54 | 0.35 | 6.5-6.6 | n.d. |
| Methanosarcina | 116 | 325 | 633 | — | | 60 | 0.2-0.25 | 7-7.2 | biotin |
| thermophila | | | | | | | | | |
| Methanosarcina | 117 | 325 | 633 | — | | 60 | 0.2-0.25 | 7-7.2 | biotin |
| thermophila CHTI-55 | | | | | | | | | |
| Methanosarcina | 124 | 327 | 629 | — | | 42 | 0.4-0.6 | 7-8.7 | biotin |
| vacuolata | | | | | | | | | |
| Methanothermobacter | 225 | 470 | 634 | — | | n.d. | n.d. | 7.7 | Rumen fluid, |
| defluvii | | | | | | | | | nutrient broth |
| Methanothermobacter | 220 | 356 | 635 | — | | 70 | 0.2-0.4 | 7 | n.d. |
| marburgensis | | | | | | | | | |
| Methanothermobacter | 222 | 470 | 634 | — | | n.d. | n.d. | n.d. | n.d. |
| sp. CaT2 | | | | | | | | | |
| Methanothermobacter | 224 | 470 | 634 | — | | n.d. | n.d. | n.d. | n.d. |
| sp. EMTCatA1 | | | | | | | | | |
| Methanothermobacter | 213 | 498 | 636 | — | | n.d. | n.d. | n.d. | n.d. |
| sp. MT-2 | | | | | | | | | |
| Methanothermobacter | 214 | 497 | 637 | — | | 80 | n.d. | 7-7.2 | yeast extract |
| tenebrarum | | | | | | | | | |
| Methanothermobacter | 223 | 470 | 634 | — | | 75 | 0.50 | 6 | NaCl, Na2S |
| thermautotrophicus | | | | | | | | | |
| Methanothermobacter | 221 | 356 | 635 | — | | 74 | n.d. | 8 | n.d. |
| wolfeii | | | | | | | | | |
| Methanothermococcus | 151 | 342 | 644 | — | | 75 | 0.34 | 7-7.4 | Ni, Fe, Co, Mg, |
| okinawensis IH1 | | | | | | | | | Ca, SeO4, CO2, |
| | | | | | | | | | 2methylbutyrate, |
| | | | | | | | | | propionate, |
| | | | | | | | | | isoleucine, |
| | | | | | | | | | leucine |
| Methanothermococcus | 148 | n.d. | — | — | | 70 | 0.00 | 6.5-7 | acetate, yeast |
| thermolithotrophicus | | | | | | | | | extract |
| Methanothermus | 170 | 355 | 638 | — | | 97 | n.d. | 7 | rumen fluid, |
| fervidus | | | | | | | | | yeast extract |
| Methanothrix | 86 | 322 | 639 | — | | n.d. | n.d. | n.d. | n.d. |
| soehngenii | | | | | | | | | |
| Methanothrix | 92 | 323 | 640 | — | | n.d. | n.d. | n.d. | n.d. |
| thermoacetophila PT | | | | | | | | | |
| Methanotorris | 153 | 506 | 641 | 507 | 661 | 83 | 0.00 | 7 | n.d. |
| formicicus Mc-S-70 | | | | | | | | | |
| Methanotorris igneus | 152 | 350 | 642 | — | | 91 | 0.00 | 6.8-7.5 | acetate, yeast |
| Kol 5 | | | | | | | | | extract, |
| | | | | | | | | | tungsten, |

*Alternative or secondary recognition motifs derive from additional MtrA paralogs in the respective organisms.

[0284] The present invention is also illustrated by the appended non-limiting Figures and Examples.

### BRIEF DESCRIPTION OF FIGURES

[0285] FIG. 1: Structure-based sequence alignment.

[0286] Shown is an alignment of the Methanocaldococcus jannaschii proteasome β subunit (SEQ ID NO: 435), M. jannaschii Adriase (SEQ ID NO: 159) and Methanosarcina mazei Adriase (SEQ ID NO: 108). Secondary structure elements are indicated by arrows (beta-sheets) and tubes (helices). Identical residues between two sequences are marked by asterisks. The alignment visualizes the distant relationship between proteasomal NTN (N-terminal nucleophile) and Adriase DUF2121 domains. Some Adriase variants, such as the one from M. jannaschii, contain an additional C-terminal six-stranded OB-like domain that is connected to the DUF2121 domain through a long helix.

[0287] FIG. 2: Adriase covalently modifies MtrA^{N}.

[0288] (A) SDS-PAGE of a pulldown experiment with His₆-tagged M. mazei Adriase (SEQ ID NO: 380). While the control protein BSA is removed in flow-through (FT) and wash fractions (W₁₋₄), MtrA (SEQ ID NO: 390) co-elutes with Adriase and MtrA^{N}-Adriase conjugate (Elu; SEQ ID NO: 431). MtrA^{C} (SEQ ID NO: 432) is not detected, due to its small size.

[0289] (B-D) Liquid chromatography mass spectrometrical (LCMS) analysis of the Adriase (SEQ ID NO: 390) reaction with MtrA (SEQ ID NO: 380). The spectra show identified masses in the eluted fractions, which are interpreted as MtrA^{C} (SEQ ID NO: 432; theoretical mass: 6844.7 Da/detected mass: 6844.7 Da), MtrA (24445.9 Da/24442.7 Da), Adriase (22068.2 Da/22067.8 Da), MtrA^{N}-Adriase conjugate (SEQ ID NO 431; 39669.4 Da/39665.8 Da) and non-covalent MtrA-Adriase complex (46514.1 Da/46510.5 Da; disassembles during SDS-PAGE).

[0290] FIG. 3: Comparison of Adriase recognition motifs.

[0291] Shown is an alignment of the (K/R)DPGA motif with the 15 preceding and the 10 following amino acids in a phylogenetically diverse set of MtrA proteins (SEQ ID NO 423 and 436-449). The sequence conservation is visualized above the alignment, with larger letters indicating higher conservation. All shown MtrA proteins co-occur with Adriase.

[0292] FIG. 4: The Adriase N-terminus forms an amide bond with MtrA aspartate.

[0293] Shown is an MS/MS spectrum of the fusion peptide resulting from amide bond formation between the M. mazei Adriase N-terminus (TLVIAFIGK . . . ; SEQ ID NO: 108) and the MtrA KDPGA-motif (SEQ ID NO: 328). The sample was digested with trypsin and free amino-groups dimethylated. The threonine amino group is not modified, suggesting its involvement in an amide bond.

[0294] FIG. 5: MtrA-Adriase forms a heterodimer, in which MtrA is bound via a short amino acid motif.

[0295] (A) M. jannaschii MtrA (SEQ ID NO: 420) and Adriase (SEQ ID NO: 386) proteins were loaded individually on a gel filtration column or as a 1:1 molar mixture. While Adriase and MtrA alone show a comparable elution behavior, the mixture of both elutes at a lower volume, indicating complex formation. This interpretation is supported by light scattering measurements (thick lines, plotted on the secondary Y-axis). The determined masses (table) closely resemble the theoretical monomeric masses for Adriase and MtrA alone and for the MtrA-Adriase heterodimer.

[0296] (B) The K_{D} for MtrA-Adriase (SEQ ID NO: 386 and 420) complex formation was determined via microscale thermophoresis in three independent measurements (chromatogram). Measurements for peptides (SEQ ID NO: 367-372) that mimic the MtrA binding site (table) show that the 15 amino acid peptide (0)KDPGA(10) (SEQ ID NO: 372) is sufficient for this high affinity interaction.

[0297] FIG. 6: Adriase binds its recognition motif via beta-sheet interactions.

[0298] Shown is the crystal structure of M. jannaschii Adriase^{S1A} (SEQ ID NO: 386) in complex with (15)KDPGA(10) (SEQ ID NO: 367). A dashed line indicates the modification site.

[0299] FIG. 7: Adriase modifications are reversible and allow the recombination of substrates.

[0300] (A) SDS-PAGE showing the time course of the M. jannaschii MtrA-Adriase reaction (SEQ ID NO: 385 and 420). Only a small fraction of MtrA is bound to Adriase at any time, suggesting the reversibility of the reaction.

[0301] (B) The same reaction in presence of a second Adriase substrate, Ubiquitin fused to KDPGA(10) (SEQ ID NO: 392). Both MtrA and Ub N-termini can be linked covalently to Adriase (MtrA^{N}-Adriase, Ub^{N}-Adriase; Predicted SEQ ID NO: 433-434). In the reverse reaction, they can be recombined with each of the C-termini (MtrA^{N}-Ub^{C} b^{N}-MtrA^{C} (SEQ ID NO: 427-428).

[0302] (C-D) LCMS analysis of the Adriase reaction shown in (B). The spectra show identified masses in the eluted fractions, which are interpreted as Ub-KDPGA(10) (theoretical mass: 11194 Da), Ub^{N}-MtrA^{C} (13188 Da), MtrA (21571 Da) and MtrA^{N}-Ub^{C} (19577 Da). The exchange of the C-termini results in a determined mass shift of 1994 Da and 1995 Da, respectively (theoretical mass shift: 1994 Da). The method is not quantitative.

[0303] FIG. 8: Proposed mechanism for Adriase.

[0304] The shown Adriase mechanism is a combination of the first steps of two known proteasomal reactions: proteolysis and autolysis. A substrate, R₁-R₂ (left), is cleaved (middle) and the N-terminal fragment R₁ transferred on the Adriase Thr1/Ser1 N-terminus (right; see FIG. 3). The reaction is reversible and differs from proteolysis/autolysis by avoiding the irreversible hydrolysis step (bottom): hydrolysis products could not be identified in any of the shown mass spectrometrical analyses.

[0305] FIG. 9: Adriase efficiently ligates peptides with 5 residues N- and 10 residues C-terminal of the KDPGA motif.

[0306] (A) SDS-PAGE analysis of Adriase (SEQ ID NO: 385) mediated peptide ligations with fluorophore-linked substrates (“F”), visualized by UV light. The substrate (F15)KDPGA(10) (SEQ ID NO: 367) (lane 2-4) forms a covalent bond to Adriase ((F15)KD-Adriase; Predicted SEQ ID NO: 429), resulting in the release of non-fluorescent PGA(10) (not visible; SEQ ID NO: 374); In presence of PGA(17) (SEQ ID NO: 373), (F15)KDPGA(10) is recombined to (F15)KDPGA(17) (Predicted SEQ ID NO: 413). Substrates with C-terminal fluorophores (lane 5-13) also form covalent bonds to Adriase (non-fluorescent), resulting in the release of small quantities of PGA(10F) (Predicted SEQ ID NO: 414); In presence of PGA(17) (SEQ ID NO: 373), non-fluorescent ligation products (15/10/5)KDPGA(17) (Predicted SEQ ID NOs: 415-417) and more PGA(10F) are formed. The migration of the peptides is dominated by the fluorophore and therefore not always proportional to their size.

[0307] (B) Michaelis-Menten plot for the recombination of (15)KDPGA(10F) (SEQ ID NO: 418) with PGA(10) (SEQ ID NO: 374). The signal was obtained by quantification of fluorescent PGA(10F) (Predicted SEQ ID NO: 414) bands in polyacrylamide gels.

[0308] (C) Table summarizing ligation rates for various substrate combinations. Results presented in B and C were determined in single experiments.

[0309] FIG. 10: Sequence determinants governing Adriase activity.

[0310] (A) M. jannaschii MtrA (SEQ ID NO: 391) and Adriase^{ΔOB S1A} (SEQ ID NO: 132) proteins were loaded individually on a gel filtration column or as a 1:1 molar mixture. The elution profile of the mixture is identical to the combined profiles of its isolated components, indicating decreased affinity of Adriase^{ΔOB S1A} (SEQ ID NO: 132) for MtrA (SEQ ID NO: 391) compared to full length Adriase^{S1A} (SEQ ID NO: 386; FIG. 5A).

[0311] (B) A set of Adriase mutants (SEQ ID NO: 380, 384-388 and 450; see main text) were screened for ligase activity with M. jannaschii MtrA-derived (15)KDPGA(10) (SEQ ID NO: 419) and PGA(10F) peptide (SEQ ID NO: 414) substrates. Fluorescent (F) substrates were subsequently detected via SDS-PAGE and UV exposure. A successful ligation produces (15)KDPGA(10F) (Predicted SEQ ID NO: 418) and PGA(10) (not visible; Predicted SEQ ID NO: 374).

[0312] FIG. 11: Ligation rate and completeness can be controlled via substrate ratios.

[0313] (A) Higher primary substrate concentrations at constant secondary substrate levels increase Adriase ligation rates. Shown are apparent ligation rates, measured by the amount of ligated product in an early reaction phase.

[0314] (B) Higher secondary substrate concentrations at constant primary substrate levels increase Adriase ligation rates up to a ratio of 1:1. A higher ratio inhibits the reaction.

[0315] (C) The percentage of ligated primary substrate as a function of secondary substrate concentration. The determined data (dots) agree with the theoretical model (solid line, see main text). Results presented in this figure (A-C) were determined in single experiments.

[0316] FIG. 12: Time courses and Michaelis-Menten plot of the M. mazei Adriase reaction

[0317] (A) Time courses of Adriase catalyzed ligations with various substrate concentrations. The determined data (symbols) show that these reactions can be described by simple formulae (lines; see main text), allowing the determination of maximum reaction rates. Shown are data for 1.25 μM (squares/dotted line), 2.5 μM (diamonds/short dash line), 5 μM (triangles/medium dash line), 10 μM (circles/dash-dotted line), 20 μM (squares/long dash line) and 40 μM (triangles/solid line).

[0318] (B) Michaelis-Menten plot of the maximum reaction rates determined in (A). Highlighted are the approximated substrate concentration for half-maximal reaction speed and the maximum ligation rate. Results presented in this figure (A-B) were determined in single experiments.

[0319] FIG. 13: Adriase does not hydrolyze its substrates.

[0320] Shown are fluorescent peptides on an SDS-gel, visualized by UV fluorescence. The gel depicts the time course of a reaction with 15 μM (F10)KDPGA(10) (SEQ ID NO: 456), 15 μM PGA(25) (SEQ ID NO: 457) and either 15 nM or 15 μM M. mazei Adriase (SEQ ID NO: 380). The products are shown in comparison to an experiment with 15 μM M. mazei Adriase and the hypothetical hydrolysis product (F10)KD (SEQ ID NO: 458) (Hydrolysis control). No band at the height of (F10)KD is observed in the first two experiments, neither at normal exposure levels (upper panel) nor with overexposure (lower panel), indicating that Adriase does not hydrolyze its substrates.

[0321] FIG. 14: An unmodified amino group at the Adriase active site serine/threonine is required for efficient ligations

[0322] Shown is an SDS-PAGE analysis of Adriase-mediated ligations of (15)KDPGA(10) (SEQ ID NO: 419) and PGA(10F) (SEQ ID NO: 414) substrates, visualized by UV light. Unmodified Adriase (SEQ ID NO: 385) generates the reaction product (15)KDPGA(10F) (SEQ ID NO: 418) at ˜200× higher rates compared to N-terminally modified Adriase (SEQ ID NO: 450), highlighting the importance of a free amino group at the active site serine for efficient ligations.

[0323] FIG. 15: N-terminal Adriase modifications are subject to non-specific proteolysis

[0324] Liquid chromatography mass spectrometrical (LCMS) analysis of N-terminally modified Adriase (SEQ ID NO: 450). The spectra shows the most prominent masses, automatically assigned by the Bruker Compass DataAnalysis software. These are interpreted as N-terminally modified Adriase lacking the start-methionine (Δ1, SEQ ID NO: 511; theoretical mass: 35909.6 Da/detected mass: 35909.4 Da), the first 8 (Δ8, SEQ ID NO: 512; 34992.7 Da/34993.3 Da), the first 10 (Δ10, SEQ ID NO: 513; 34768.4 Da/34769.2 Da), the first 11 (Δ11, SEQ ID NO: 514; 34681.4 Da/34682.9 Da) or the first 21 (Δ21, SEQ ID NO: 515; 33746.3 Da/33745.7 Da) residues. The Δ21 truncation exposes the active site serine, rendering this variant catalytically active.

[0325] FIG. 16: Schematic representation of Adriase ligation strategies and their potential applications.

[0326] (A) When used on two (5)KDPGA(10) substrates, Adriase catalyzes an equilibrium between the four possible (5)KD-PGA(10) combinations. The ratio of these products depends on the kinetic parameters for their reaction with Adriase and on substrate ratios. When these are similar, the reaction results in equimolar products.

[0327] (B) When used on one (5)KDPGA(10) and one PGA(10) substrate, Adriase catalyzes an equilibrium between just two possible (5)KD-PGA(10) combinations, increasing yields for a given ligation product.

[0328] (C) The (5)KDPGA(10) substrate can potentially be replaced by the reaction intermediate, (5)KD-Adriase.

[0329] (D) Adriase-mediated ligations are useful for engineering novel molecules that cannot be obtained by genetic or chemical means. For example, bispecific or hybrid antibodies (Alam (2017) Chembiochem 18:2217-2221) can be designed through rearrangement of the respective modular Fc, Fab and scFv regions. Similarly, proteins can be linked to non-proteinaceous compounds, such as imaging agents or bioactive molecules (Veggiani (2016) Proc Natl Acad Sci USA 113:1202-7).

[0330] (E) Adriase can be used to immobilize proteins on nanoparticles, increasing the efficiency of multienzyme pathways. Furthermore, it is envisaged herein to use Adriase for covalent and/or geometrically defined attachment of proteins and/or protein complexes on surfaces/solid carriers for microscopy applications, e.g. electron microscopy, especially cryo-electron microscopy.

[0331] (F) Adriase-mediated ligations enable segmental isotopic labeling, which is useful for structure determination via NMR (Liu (2017) Methods Mol Biol 1495:131-145).

[0332] (G) Adriase facilitates a variety of immunotherapeutic techniques. For example, a virus-like particle (VLP) fused to a variety of antigens is far more efficient in immunization than the individual antigens (Thrane (2016) J Nanobiotechnology 14:30). A VLP displaying the PGA(10) motif on its capsid proteins could present a versatile tool allowing for the simultaneous ligation of a selection of (5)KDPGA(10)-linked antigens.

[0333] (H) Adriase allows anchoring of molecules on the cell surface or can target them to specific tissues or cell compartments. For example, proteins can be fused to membrane proteins and thereby be enriched in outer membrane vesicles, which increase their stability and are useful for drug delivery (Alves (2015) ACS Appl Mater Interfaces 7:24963-72).

[0334] (I) Adriase can be used to produce circular proteins, which are exceptionally useful in therapeutic applications, due to their increased stability (van't Hof (2015) Biol Chem 396:283-93).

[0335] (J) Adriase can catalyze internal ligations in disulfide-bonded substrates, allowing the formation of non-canonical protein assemblies.

[0336] (K) Column resins with immobilized Adriase can be recycled and potentially obviate the need for subsequent purifications. They can be used to react with the Y-(5)KD moiety of a primary substrate. The ligation product can subsequently be eluted by addition of the secondary PGA(10)-Z substrate.

[0337] (L) The tight interaction between Adriase and its substrates can be used for affinity chromatography. A resin with immobilized inactive Adriase^{S1A} binds a KDPGA(0)- and possibly also PGA(10)-tagged protein (shown) with submicromolar affinity. The purified protein can then be eluted with an excess of PGA(10) peptides. The resin is also useful for pulldown experiments.

[0338] (M) Adriase could potentially obviate the need for antibodies in western blots by ligating a reporter enzyme (e.g. alkaline phosphatase) bearing the Adriase recognition motif to PGA(10)-tagged proteins on the blot. These can subsequently be detected via established methods, e.g. with NBT/BCIP.

[0339] FIG. 17: The MtrA C-terminus is not required for interaction with Adriase

[0340] M. jannaschii MtrA^{Δ174-245} (SEQ ID NO: 518) and Adriase (SEQ ID NO: 386) proteins were loaded individually on a gel filtration column or as a 1:1 molar mixture. The mixture of both elutes at a lower volume than Adriase and MtrA^{Δ174-245} alone, indicating complex formation. This interpretation is supported by light scattering measurements (thick lines, plotted on the secondary Y-axis). The determined masses (table) closely resemble the theoretical monomeric masses for Adriase and MtrA^{Δ174-245} alone and for the MtrA^{Δ174-245}-Adriase heterodimer. Thus, MtrA^{Δ174-245} behaves just like M. jannaschii MtrA^{Δ194-245} (SEQ ID NO: 420; FIG. 5A) in this respect, indicating that residues 174-245 are not required for an interaction with Adriase.

[0341] FIG. 18: The (O)KDPGA(10) motif is sufficient for a high-affinity interaction with Adriase

[0342] The K_{D} for Adriase (SEQ ID NO: 386) complex formation with M. jannaschii MtrA^{Δ174-245} (SEQ ID NO: 518) or MtrA-derived peptides (SEQ ID NO: 367-372) was determined via microscale thermophoresis in three independent measurements. The resulting chromatograms provide the basis for the K_{D} values shown in FIG. 5B.

[0343] FIG. 19: The Adriase NTN domain is involved in binding of MtrA

[0344] M. jannaschii MtrA (SEQ ID NO:420) and M. jannaschii Adriase^{ΔNTN} (SEQ ID NO: 519) proteins were loaded individually on a gel filtration column or as a 1:1 molar mixture. The mixture of both elutes at the same volume as Adriase^{ΔNTN} and MtrA alone, indicating that no complex is formed under these conditions. This interpretation is supported by light scattering measurements (thick lines, plotted on the secondary Y-axis; table).

[0345] FIG. 20: Adriase ligase reactivity is not dependent on the presence of the OB-like domain.

[0346] (a, b) SDS-polyacrylamide sample gels showing the time course of M. jannaschii Adriase and Adriase^{ΔOB}-catalyzed (SEQ ID NO: 385 and 387) ligations using M. jannaschii MtrA-derived His₆-Ub-(5)KDPGA(10) (SEQ ID NO: 526) and PGA(15)-Ub-His₆ (SEQ ID NO: 527) substrates. The band intensities of educt and product bands in three such gels were quantified and used to visualize the ligation ratios in a plot (b). The observed ligation rates are similar for both full-length and Adriase and Adriase^{ΔOB}, indicating that the OB-like domain is not necessary for Adriase ligations.

[0347] FIG. 21: Kinetic analysis of an Adriase-catalyzed protein-protein ligation.

[0348] (a) SDS-polyacrylamide sample gels depicting the time course of the same ligation reaction at various substrate concentrations.

[0349] (b) Quantification of ligation reactions, as shown in (a).

[0350] (c) Michaelis-Menten plot with ligation rate coefficients based on the data fits in (b). The kinetic parameters (k_{cat} and [S]_{0.5}) are approximated and based on additional data (not shown) for higher substrate concentrations: 0.74±0.05 sec⁻¹ at 25 μM, 0.88±0.07 sec⁻¹ at 50 μM, and 0.90±0.14 sec⁻¹ at 100 μM substrate concentration.

[0351] FIG. 22: M. mazei Adriase does not hydrolyze protein substrates.

[0352] Polyacrylamide gel showing a test for M. mazei Adriase (SEQ ID NO: 380) hydrolase activity with Ub-(5)KDPGA(15) (SEQ ID NO: 522) and PGA(10) (SEQ ID NO: 454) substrates. At an enzyme:substrate concentration of 1:1000 (1×), Adriase catalyzes ˜50% product formation (i.e. Ub-(5)KDPGA(10) (SEQ ID NO: 524)) in 30 minutes without forming the putative hydrolysis product Ub-(5)KD (SEQ ID NO: 523). Even at 1000× increased enzyme concentrations and prolonged incubation times, no hydrolysis product can be detected.

[0353] FIG. 23: Adriase is a versatile protein ligase

[0354] Polyacrylamide gel showing the incubation of M. mazei Adriase (SEQ ID NO: 380) with various proteins bearing the Adriase recognition motif. A constant fraction of Ub-(5)KDPGA(10) (SEQ ID NO: 524) forms a conjugate with Adriase (Ub-(5)KD-Adriase), suggesting a reversible reaction between the two (lanes 1-4). In place of PGA(10), PGA(10)-sdAb/CyP/GST (SEQ ID NO: 663-665) can be used as alternative substrates for the “reverse reaction”, resulting in an equilibrium of the respective educts and Ub-(5)KDPGA(10)-sdAb/CyP/GST products (lanes 5-10).

[0355] FIG. 24: (5)KDPGA(10) is a good ligation motif for sterically accessible substrates, whereas (5)KDPGA(15) is more efficient for sterically demanding substrates.

[0356] (a, b) Time courses of M. mazei Adriase (SEQ ID NO: 380)-mediated ligations of various peptide or protein substrate pairs, visualized via SDS-PAGE and analyzed by band quantification (plots). Shown are sample gels, each representing three independent experiments. Substrates were used at 25 μM, in 400× molar excess over Adriase. For the ligation with Ub-(5)KDPGA(15) and PGA(10)/PGA(15) peptides (SEQ ID NO: 454 and 528), an additional Strep-tag sequence (indicated by an asterisk) was added C-terminal of the Ub-(5)KDPGA(15) substrate (SEQ ID NO: 522), so that the ligation results in a size shift. The data fits allow the determination of the rate coefficients depicted in tables. No Adriase activity was observed with (0)KDPGA(10) or PGA(5) substrates (n.d.; SEQ ID NO: 531 and 529).

[0357] FIG. 25: Comparison of Adriase- and Sortase-mediated protein-protein ligations.

[0358] (a) SDS-polyacrylamide sample gels and derived plot showing the time course (triplicates) of comparable protein-protein ligations using M. mazei Adriase (SEQ ID NO: 380), S. aureus Sortase A (SrtA, SEQ ID NO: 662) or evolved SrtA pentamutant (SrtA5*, SEQ ID NO: 535). Although Adriase is used at a 400× lower concentration, it catalyzes the ligation at much higher rates and without side-products.

[0359] (b) The same experiments at 32× higher substrate concentrations (i.e. 100 μM). Although these conditions are much more suitable for the Sortase reaction, Adriase shows ˜4000× higher ligase activity compared to non-optimized (SrtA) and ˜40× higher ligase activity compared to optimized (SrtA5*) Sortase enzymes

[0360] FIG. 26: Adriase shows high substrate specificity in complex solutions

[0361] Polyacrylamide gel showing the ligation of two recombinantly expressed substrates (Strep-Ub-(5)KDPGA(10)-His₆ and PGA(15)-Ub (SEQ ID NO: 538 and 539) in cell lysates and the single step purification of the respective ligation product (Strep-Ub-(5)KDPGA(15)-Ub) using a Ni-NTA column in series with a Streptavidin column.

### EXAMPLE 1: DESIGN, CLONING AND PURIFICATION OF RELEVANT GENES

[0362] As will be shown in the following examples, Adriase is not only highly divergent in sequence, structure and substrate specificity from the proteasome, but also assumes an entirely different catalytic mechanism and function. Despite these differences, it was envisaged in context of the present invention that in analogy to the proteasome, a conserved serine or threonine residue may act as catalytic residue upon removal of the preceding amino acids (FIG. 1). In the proteasome, this is achieved through autocatalytic cleavage of the propeptide upon complex assembly. Because Adriase neither forms such a complex (FIGS. 5A and 6) nor appears to possess hydrolytic activity, it was further envisaged that a methionine aminopeptidase might be used for its activation by removing the start-methionine preceding the conserved serine or threonine residue. Thus, in the following, all Adriase constructs were produced without further N-terminal modifications (such as purification tags) in methionine aminopeptidase encoding strains. The so produced proteins indeed lack the start-methionine (FIG. 2D) and instead have a free amino group at the active site, a prerequisite for efficient catalysis (FIG. 10B).

[0363] For the following experiments, Adriase genes MM_2909 (SEQ ID NO: 376) and MJ_0548 (SEQ ID NO: 378) as well the MtrA genes MM_1543 (SEQ ID NO: 377) and MJ_0851 (SEQ ID NO: 379) originating from Methanocaldococcus jannaschii and Methanosarcina mazei were amplified via PCR from genomic DNA of said archaea (DSM3647 and DSM2661 (DSMZ)) and cloned into pET30 vectors for recombinant protein expression in Escherichia coli BL21 DE3 cells (Stratagene) with the help of the rare codon plasmid pACYC-RTL. An exception presented N-terminally modified M. jannaschii MtrA (SEQ ID NO: 450), which was cloned into pET28b vector instead. Through choice of appropriate PCR primers (SEQ ID NO: 394-401, 403-412, 451-452 and 540-542), the following variations were produced: M. mazei Adriase (MM_2909; SEQ ID NO:376) with a sequence encoding a C-terminal His₆- (SEQ ID NO: 380)), Strep- (SEQ ID NO: 381)), Myc- (SEQ ID NO: 382) or HA-tag (SEQ ID NO:383) and as active site mutant Adriase^{T1A} with C-terminal His₆-tag (SEQ ID NO: 384); M. jannaschii Adriase (MJ_0548) was cloned with a C-terminal His₆-tag (SEQ ID NO: 385), as active site mutant Adriase^{S1A} with C-terminal His₆-tag (SEQ ID NO: 386), without OB-like domain (Δ203-293, C-terminal His₆-tag; SEQ ID NO: 387), as active site mutant without OB-domain (Adriase^{ΔOB S1A} C-terminal His₆-tag; SEQ ID NO: 132), without NTN domain (SEQ ID NO: 519), without insertion element (Δ28-57, C-terminal His₆) (SEQ ID NO: 388) and with N-terminal His₆-tag (N-His₆, SEQ ID NO: 450); Truncated MtrA constructs, M. mazei MtrA^{Δ219-240} (MM_1543; SEQ ID NO: 377) with N-terminal Strep-tag (SEQ ID NO: 390), M. jannaschii MtrA^{Δ225-245} (MJ_0851; SEQ ID NO: 379) with N-terminal His₆-tag (SEQ ID NO: 391) and M. jannaschii MtrA^{Δ174-245} with N-terminal His₆-tag (SEQ ID NO: 519), were also generated. The Ub-KDPGA(10) construct (SEQ ID NO: 392) was produced by replacing the C-terminus (amino acids 82-87 of SEQ ID NO: 422) of precursor C. subterraneum ubiquitin (Csub_C1474, synthesized by Eurofins; SEQ ID NO: 393) with the M. jannaschii MtrA KDPGA(10) motif (amino acids 159-173; SEQ ID NO: 423) and by introducing an N-terminal His₆-tag (a summary of the templates and primers used can be found in Table 2). In a similar manner, N-terminally His-tagged Ubiquitin was modified C-terminally with the M. mazei MtrA-derived sequences (5)KDPGA(15), (5)KDPGA(15)-Strep, (5)KDPGA(10), (5)KD and with the M. jannaschii MtrA derived sequences (5)KDPGA(10) (SEQ ID NO: 520, 522-524, 526). C-terminally His-tagged Ubiquitin was modified N-terminally with a start-methionine and the M. mazei MtrA-derived sequence PGA(10), PGA(15), PGA(20) or the M. jannaschii MtrA derived sequence PGA(15) (SEQ ID NO: 521, 525, 527 and 530). Furthermore, Ubiquitin gene variants with an a C-terminal GGSLPETGGGHIIHIHH tag (SEQ ID NO: 536), with an N-terminal His₆-tag, TEV cleavage site and GG modification (SEQ ID NO: 537) or with N-terminal Strep- and C-terminal M. mazei MtrA derived (5)KDPGA(10)-His modification (SEQ ID NO: 538) were generated. Camelid α-ricin single-domain antibody (sdAb), Cyclophilin (CyP) or Glutathione-S-Transferase (GST) sequences were fused to an N-terminal M. mazei PGA(10) sequence and a C-terminal His₆-tag (SEQ ID NO: 663-665). Finally, Sortase A (SrtA; SEQ ID NO: 662) and the Sortase A pentamutant (SrtA5*; SEQ ID NO: 535) were cloned as published by Chen et al. (Chen (2011) loc. cit.) without the N-terminal membrane anchor (residues 1-59) and with an N- (SrtA) or C-terminal (SrtA5*) His₆-tag. Amongst the above constructs, SEQ ID NO: 522, 526, 527, 535-539 and 662-665 were synthesized by Biocat. SEQ ID NO: 380-388, 521, 525, 527, 530, 539 were cloned with a start-methionine, that was removed through expression in a methionine aminopeptidase encoding strain.

TABLE 2
Primer and template DNA sequences for the generation of protein constructs in this work

| | | Template | fwd | rvs |
|---|---|---|---|---|
| SEQ | | DNA | Primer | Primer |
| ID | | SEQ | SEQ | SEQ |
| NO | Name | ID NO | ID NO | ID NO |
| 380 | M. mazei Adriase with C-terminal His-tag | 376 | 394 | 396 |
| 381 | M. mazei Adriase with C-terminal Strep-tag | 376 | 394 | 397 |
| 382 | M. mazei Adriase with C-terminal Myc-tag | 376 | 394 | 398 |
| 383 | M. mazei Adriase with C-terminal HA-tag | 376 | 394 | 399 |
| 384 | M. mazei Adriase T1A mutant with C-terminal His-tag | 376 | 395 | 396 |
| 385 | M. jannaschii Adriase with C-terminal His-tag | 378 | 400 | 403 |
| 386 | M. jannaschii Adriase S1A mutant with | 378 | 401 | 403 |
| | C-terminal His-tag | | | |
| 387 | M. jannaschii Adriase without OB, with | 378 | 400 | 404 |
| | C-terminal His-tag | | | |
| 132 | M. jannaschii Adriase S1A without OB, | 378 | 401 | 404 |
| | with C-terminal His-tag | | | |
| 388 | M. jannaschii Adriase Δ28-57, C-terminal His6 | 378 | 400/405 | 403/406 |
| 390 | M. mazei MtrAΔ219-240 with N-terminal Strep-tag | 377 | 407 | 408 |
| 391 | M. jannaschii MtrAΔ225-245 with N-terminal His6-tag | 379 | 409 | 410 |
| 392 | M. jannaschii Ub-KDPGA(10) | 393 | 411 | 412 |
| 450 | M. jannaschii Adriase with N-terminal His6-tag | 378 | 451 | 452 |
| 518 | M. jannaschii MtrAΔ174-240 with N-terminal His6-tag | 379 | 409 | 540 |
| 519 | M. jannaschii Adriase without NTN, with | 378 | 541 | 542 |
| | C-terminal His-tag | | | |
| 520 | M. mazei Ub-(5)KDPGA(15) with N-terminal His-tag | 393 | 543 | 545 |
| 521 | M. mazei PGA(15)-Ub with C-terminal His-tag | 393 | 549 | 544 |
| 522 | M. mazei Ub-(5)KDPGA(15) with N-terminal | synthesized | | |
| | His- and C-terminal Strep-tag | by Biocat | | |
| 523 | M. mazei Ub-(5)KD with N-terminal His-tag | 393 | 543 | 547 |
| 524 | M. mazei Ub-(5)KDPGA(10) with N-terminal His-tag | 393 | 543 | 546 |
| 525 | M. mazei PGA(10)-Ub with C-terminal His-tag | 393 | 548 | 544 |
| 526 | M. jannaschii Ub-(5)KDPGA(10) with | synthesized | | |
| | N-terminal His-tag | by Biocat | | |
| 527 | M. jannaschii PGA(15) with C-terminal His-tag | synthesized | | |
| | | by Biocat | | |
| 530 | M. mazei PGA(20)-Ub with C-terminal His-tag | 393 | 550 | 544 |
| 535 | SrtA5* delta 1-59 with C-terminal His-tag | synthesized | | |
| | | by Biocat | | |
| 536 | Ub-GGSLPETGGG | synthesized | | |
| | | by Biocat | | |
| 537 | GGG-Ub | synthesized | | |
| | | by Biocat | | |
| 538 | M. mazei Ub-(5)KDPGA(10) with N-terminal | synthesized | | |
| | Strep and C-terminal His-tag | by Biocat | | |
| 539 | M. mazei PGA(15)-Ub | synthesized | | |
| | | by Biocat | | |
| 662 | His₆-SrtA^{Δ1-59} | synthesized | | |
| | | by Biocat | | |
| 663 | M. mazei PGA(10)-sdAb | synthesized | | |
| | | by Biocat | | |
| 664 | M. mazei PGA(10)-CyP | synthesized | | |
| | | by Biocat | | |
| 665 | M. mazei PGA(10)-GST | synthesized | | |
| | | by Biocat | | |

In general, PCR was performed with Q5 polymerase (NEB) according to the manufacturer's instructions, except for the use of just 0.2 μM of each primer. The PCR fragments were then visualized on 1% agarose gels with Stain G (Serva, used 1:30000). In case of a successful amplification, the PCR products were purified with the PCR purification kit (Qiagen), digested with NdeI/XhoI Fast-Digest enzymes (Thermo) and purified yet another time with the PCR purification kit (Qiagen). pET30 vectors were digested and purified in the same manner, except for the addition of alkaline phosphatase (FastAP, Thermo). Ligations were then performed with 100 ng vector and a threefold molar excess of PCR insert in a 20 μl reaction with T4 Ligase (NEB) at 16° C. After 1h, the ligations were used for transformation of chemically competent Top 10 cells (Thermo) and selected for pET30 plasmid on agar plates with 50 μg/ml kanamycin (Roth) at 37° C. After 16 h, resistant colonies were cultivated in LB supplemented with 50 μg/ml kanamycin and used for plasmid isolation with the QIAprep Spin Miniprep Kit (Qiagen). The insertion of the PCR product of interest was then tested by Sanger sequencing using BigDye Terminator v3.1 (Thermo). In case of a successful insertion, the respective plasmids were used for transformation of BL21 DE3 cells (Stratagene) containing the rare codon plasmid pACYC-RIL.

[0364] The transformed cells were grown at 25° C. in M9 minimal medium supplemented with 50 μg/ml Se-Met, Leu, Ile, Phe, Thr, Lys and Val for Se-Met labeling, or in lysogeny broth (LB) for all other purposes. The kanamycin concentration was kept at 25 μg/ml and the chloramphenicol concentration at 12.5 μg/ml. Protein expression was induced at an optical density of 0.4 at 600 nm with 500 μM isopropyl-β-D-thiogalactoside. After 16 h, cells were harvested and all subsequent steps conducted at 7° C., unless stated otherwise. The cell pellet of His₆-tagged constructs was resuspended in 100 mM Tris-HCl pH 8.0, 10 mM Imidazole, 5 mM MgCl₂, 50 μg/ml DNAse (Applichem) and cOmplete protease inhibitor (Roche) and the pellet of all other constructs in 100 mM Tris-HCl pH 8.0, 10 mM TCEP, 5 mM MgCl₂, 50 μg/ml DNAse and cOmplete protease inhibitor. Cells were lysed by three french press passages at 16000 psi, and cleared from cell debris by ultracentrifugation at 100000 g for 45 min. The supernatant was then filtered using membrane filters (Millipore) with a pore size of 0.22 μm.

[0365] His₆-tagged proteins were purified via HisTrap HP columns (all columns obtained from GE Healthcare) using an Akta Pure FPLC (GE Healthcare) with Unicorn v5.1.0 software. The filtrated supernatant was applied to the equilibrated column (20 mM Tris-HCl pH 8.0, 250 mM NaCl, 20 mM imidazole) and washed with 10 additional column volumes of the same buffer. Bound proteins were then eluted by gradually increasing the imidazole concentration up to 300 mM. The eluted fractions were analyzed via SDS-PAGE and those containing the protein of interest at comparatively high purity pooled and used for subsequent purification steps.

[0366] Strep-tagged constructs were purified in the same manner, except for the use of Streptavidin HP columns, a buffer containing 20 mM HEPES-NaOH pH 7.5 and 250 mM NaCl, and a gradient ranging from 0-2.5 mM desthiobiotin.

[0367] Next, the His₆-tag of the GGG-Ub substrate (SEQ ID NO: 537) was removed using TEV protease (resulting in GGG-Ub (SEQ ID NO: 666)) and the His₆-tag of the N-terminally tagged Adriase variant (SEQ ID NO: 451) was removed using Thrombin (resulting in SEQ ID NO: 667). TEV protease was purchased from Sigma and used at weight ratio of 1:10 for 24 h at room temperature in a dialysis tube (buffer exchange to 50 mM Tris pH 8, 0.5 mM DTT, 0.1 mM EDTA). Thrombin protease was purchased from Calbiochem and used at ratio of 10 units per mg of protein for 24 h at room temperature in a dialysis tube (buffer exchange to 50 mM Tris pH 8, 10 mM CaCl₂)). Both digests (i.e. GGG-Ub and N-terminally modified Adriase) were then applied a second time to an equilibrated Ni-NTA column (20 mM Tris-HCl pH 8.0, 250 mM NaCl, 20 mM imidazole) and the processed proteins collected in the flow-through.

[0368] After these initial purification steps, thermostable M. jannaschii and C. subterraneum proteins were incubated for 10 min at 80° C. and denatured protein removed via centrifugation. The supernatant was then filtered using a membrane filters (Millipore) with a pore size of 0.22 μm and used for subsequent purification steps.

[0369] Next, all proteins were concentrated using Amicon centrifugal filters with a 10 kDa molecular weight cut-off (Merck) to a concentration of 10 g/1. An exception presented the MtrA constructs, which were concentrated to 3 g/l (M. mazei MtrA^{Δ219-240} with N-terminal Strep-tag (SEQ ID NO: 390)) and 8.5 g/l (M. jannaschii MtrA^{Δ225-245} with N-terminal His₆-tag (SEQ ID NO: 391)), respectively.

[0370] Finally, a maximum of 0.02 column volumes of the concentrated proteins were applied to a Superdex 75 size-exclusion column (buffer A: 20 mM HEPES-NaOH pH 7.5, 100 mM NaCl, 50 mM KCl, 0.5 mM TCEP). Eluted fractions were analyzed via SDS-PAGE, pooled and concentrated as described above. For long-term storage, the protein containing fractions were supplemented with 15% glycerol, flash frozen in liquid nitrogen and stored at −80° C.

[0371] The identity and purity of the purified proteins was confirmed via SDS-PAGE (all constructs) and a variety of other methods, including mass spectrometry, light scattering and X-ray crystallography, as described in the following. While these methods confirmed the expected sequence of all other constructs, LC-MS (Liquid chromatography-mass spectrometry) revealed the mass of an MtrA^{Δ194-245} (SEQ ID NO: 420) truncation (FIG. 7D) for the M. jannaschii MtrA^{Δ225-245} (SEQ ID NO: 391) construct. This suggested proteolysis by endogenous E. coli proteases, a common phenomenon when purifying proteins with long unstructured terminal regions, such as the MtrA C-terminal linker between catalytic domain and membrane anchor. Because the obtained MtrA^{Δ194-245} (SEQ ID NO: 420) showed high stability and contained the catalytic domain with the crucial Adriase recognition motif, it was used in the following experiments.

### EXAMPLE 2: ADRIASE INTERACTS WITH METHYLTRANSFERASE A (MTRA)

[0372] To elucidate the so far unknown function of Adriase proteins, a pulldown experiment was conducted, in which M. mazei Adriase was coupled to magnetic beads via C-terminal Strep-(Experiment 2.1; SEQ ID NO:381), Myc- (Experiment 2.2; SEQ ID NO:382) or HA-tags (Experiment 2.3; SEQ ID NO:383) and incubated with whole cell extract from M. mazei. After several washes, bound proteins were eluted and analyzed via mass spectrometry.

[0373] Specifically, M. mazei Adriase fused to Strep- Myc- or HA-tags was recombinantly expressed in E. coli BL21 (DE3) containing the pACYC-RIL plasmid. Cells were grown at 25° C. in 50 ml LB medium, supplemented with 25 μg/ml kanamycin and 12.5 μg/ml chloramphenicol. Protein expression was induced at an optical density of 0.4 at 600 nm with 500 μM isopropyl-β-D-thiogalactoside. After 16 h, cells were harvested and all subsequent steps conducted at 7° C., unless stated otherwise. The cell pellet of was resuspended in 20 mM MOPS-NaOH pH 7.1, 150 mM NaCl, 100 mM KCl, lysed by three french press passages at 16000 psi, and cleared from cell debris by ultracentrifugation at 100000 g for 45 min. The supernatant was then filtered using a membrane filters (Millipore) with a pore size of 0.22 μm and supplemented with 0.15% NP40. For binding the tagged Adriase proteins to beads, Magnetic Streptavidin- (87.5 μl; Experiment 1), anti-Myc (Thermo, 175 μl Experiment 2) or anti-HA magnetic beads (Thermo; 175 μl; Experiment 3) were incubated for 1 h at room temperature with the E. coli extracts, containing Strep-, Myc- or HA-tagged Adriase, respectively. Afterwards, the beads were washed five times with 1 ml of buffer B (20 mM MOPS-NaOH pH 7.1, 150 mM NaCl, 100 mM KCl, 0.15% NP40).

[0374] The M. mazei cell extract for the pulldown experiments was produced by cultivating M. mazei cells in anaerobic medium according to the recommendations of the DSMZ (German Collection of Microorganisms and Cell Cultures). 20 g of stationary phase cells were harvested by centrifugation, resuspended in 50 ml 20 mM MOPS-NaOH pH 7.1, 150 mM NaCl, 100 mM KCl, lysed by three french press passages and cleared from insoluble fractions by ultracentrifugation at 100000 g for 45 min. The supernatant was then filtered using a membrane filters (Millipore) with a pore size of 0.22 μm and supplemented with 0.15% NP40.

[0375] For the pulldown experiments, the produced Adriase beads were incubated with 15 ml of the M. mazei extract for 1 h at room temperature. After two washes with buffer B, bound proteins were eluted with 40 μl buffer B supplemented with 10 μM desthiobiotin or 2 mg/ml HA- or Myc-peptides, respectively. Subsequently, mass spectrometrical analysis of the final eluate was conducted.

[0376] For the mass spectrometrical analysis, bound proteins were separated via SDS-PAGE, following an in-gel tryptic digest (13 ng/μl trypsin, 20 mM ammonium bicarbonate; Borchert (Borchert (2010) Genome Res 20:837-46)). LC-MS/MS analysis was performed on a Proxeon Easy nano-LC (Thermo) coupled to an LTQ OrbitrapElite mass spectrometer (Thermo). The data were processed using MaxQuant v1.6.4 (Cox (2008) Nat Biotechnol 26:1367-72) and spectra were searched against the Uniprot M. mazei Go1 proteome (UniProt Proteome ID: UP000000595).

[0377] As illustrated in Table 3, methyltransferase A (MtrA; Seq ID NO: 423) was detected at high intensities (arbitrary units) in all three experiments. This protein is present in almost all Adriase organisms, indicating an interaction of biological significance. MtrA is part of the membrane-bound MtrA-MtrH complex and acts in the hydrogenotrophic methanogenesis pathway (Wagner (2016) Sci Rep 6:28226). For other subunits of the MtrA-MtrH complex, a significantly lower signal was determined indicating that Adriase interacts specifically and directly with MtrA.

TABLE 3
Adriase interacts with MtrA.

| | | Intensity | Intensity | Intensity |
|---|---|---|---|---|
| Rank by | Detected | (Experiment | (Experiment | (Experiment |
| Intensity | Protein | 2.1) | 2.2) | 2.3) |
| 1 | Adriase | 6.4E+09 | 6.8E+09 | 2.1E+10 |
| 2 | MtrA | 3.2E+07 | 4.9E+08 | 4.1E+09 |
| 26 | MtrH | 6.0E+07 | 6.5E+07 | 2.0E+08 |
| 263 | MtrG | 8.6E+05 | 1.2E+06 | 1.5E+07 |
| 325 | MtrB | 1.4E+06 | 3.2E+06 | 6.2E+06 |
| 373 | MtrE | 2.1E+06 | 2.2E+06 | 3.8E+06 |
| 661 | MtrF | n.d. | n.d. | 4.3E+05 |

### EXAMPLE 3: ACTIVATED ADRIASE FORMS A COVALENT BOND WITH THE N-TERMINAL MTRA (MTRA^{N}-Adriase) Fragment

[0378] To study the interaction between Adriase and MtrA as found in Example 2 in more detail, a second pulldown experiment was performed using purified M. mazei Adriase and a purified MtrA variant (SEQ ID NO: 390) lacking the C-terminal membrane anchor.

[0379] Specifically, 50 μg His₆-tagged M. mazei Adriase (SEQ ID NO: 380), 50 μg Strep-tagged M. mazei MtrA^{Δ219-240} (SEQ ID NO:390) and 50 μg BSA were incubated with 100 μl 50% (v/v) Protino Ni-NTA beads (Machery Nagel) in buffer C (20 mM Tris-HCl pH 8, 250 mM NaCl) for 5 min at room temperature. Unbound proteins were removed by centrifugation at 100 g for 1 min. After four wash steps, bound proteins were eluted with buffer C supplemented with 500 mM imidazole and the fractions analyzed via SDS-PAGE.

[0380] This analysis (FIG. 2A) did not only confirm the interaction between MtrA and Adriase by presence of both in the final eluate, but surprisingly also revealed the formation of a slower migrating reaction product. To characterize this product, Adriase and MtrA were incubated and subsequently subjected to LC-MS (Liquid Chromatography-Mass Spectrometry) analysis.

[0381] Specifically, 0.5 g/l C-terminally His₆-tagged M. mazei Adriase (SEQ ID NO:380) was incubated with 0.5 g/l Strep-tagged M. mazei MtrA^{Δ219-240} (SEQ ID NO:390) in buffer A (20 mM HEPES-NaOH pH 7.5, 100 mM NaCl, 50 mM KCl, 0.5 mM TCEP) over night at 4° C. Desalted samples were subjected to a Phenomenex Aeris Widepore 3.6 μm C4 200 Å (100×2.1 mm) column, eluted with a30-80% H₂O/acetonitrile gradient over 15 min in the presence of 0.05% trifluoroacetic acid and analyzed with a Bruker Daltonik microTOF. Data processing was performed with Bruker Compass DataAnalysis 4.2 and the m/z deconvoluted with the MaxEnt module to obtain the protein mass.

[0382] The mass spectrometrical analysis of the reaction identified masses for MtrA and for activated Adriase without N-terminal methionine, a prerequisite for catalytic activity (see Example 1; FIG. 2C-D). Moreover, it revealed a C-terminal MtrA fragment (MtrA^{C}, corresponding to positions 166 to 229 of SEQ ID NO: 390; FIG. 2B) and the corresponding MtrA^{N}-Adriase conjugate (SEQ ID NO: 431; FIG. 2D). This conjugate corresponds to the slower migrating reaction product observed in the pulldown analysis (FIG. 2A). Its mass is 18 Da lighter than the combined mass of its components (FIG. 2C-D), indicating that it is a covalent protein adduct formed by condensation. Thus, this experiment confirmed the interaction between Adriase and MtrA and revealed the formation of a covalent conjugate between the two proteins, which migrates slower in SDS-PAGE analysis.

### EXAMPLE 4: THE ADRIASE N-TERMINUS FORMS AN AMIDE BOND WITH MTRA ASPARTATE

[0383] From the protein masses determined in Example 2 (FIG. 2B-D), the MtrA modification site can be inferred: It is the position at which MtrA is processed to Adriase-MtrA^{N} and MtrA^{C}, specifically the bond between aspartate and proline within a highly conserved KDPGA motif (FIG. 3; R is used instead of K in some MtrA homologs (SEQ ID NO: 310-311)). As the Adriase catalytic center has been hypothesized to involve a conserved serine or threonine residue at its activated N-terminus (see Example 1), the postulated conjugation of MtrA^{N}(KD . . . ) with the threonine of the M. mazei Adriase N-terminus in its active form (TLVIAFIGK . . . see positions 1 to 9 of SEQ ID NO: 380) should result in the fusion peptide [ . . . ]KDTLVIAFIGK[ . . . ] (SEQ ID NO: 425).

[0384] Based on these considerations, a re-analysis of the MS data of Example 2 was performed. Because this analysis involved a trypsin digest, a tryptic peptide with the sequence DTLVIAFIGK (SEQ ID NO:426) was expected. Indeed, this fragment was as abundant as the unmodified M. mazei Adriase N-terminus, while the respective unmodified MtrA fragment was not identified (Table 4). These results show that, despite mechanistic differences in the activation of their catalytic center, both Adriase and proteasome utilize an N-terminal serine or threonine for their diverse functions.

TABLE 4
Adriase modifies MtrA.

| | | # Identi- | # Identi- | # Identi- |
|---|---|---|---|---|
| | Corres- | fications | fications | fications |
| | ponding | (Experiment | (Experiment | (Experiment |
| Peptide | Protein | 2.1) | 2.2) | 2.3) |
| TLVIAFIGK | Adriase | 23 | 26 | 26 |
| DPGAFDADPLV | MtrA | 0 | 0 | 0 |
| VEISEEGEEEEE | | | | |
| GGVVR | | | | |
| DTLVIAFIGK | MtrA^{N}- | 5 | 28 | 39 |
| | Adriase | | | |

[0385] While these results confirm that a covalent bond between the Adriase active site threonine and MtrA aspartate is formed by condensation, the nature of this bond remained enigmatic. In analogy to the first step of proteasomal hydrolysis (Huber (2016) Nat Commun 7:10900), it appeared possible that an ester bond is formed involving the threonine hydroxyl group and the aspartate carbonyl group. However, such a bond would be labile and accordingly, is hydrolyzed in the second step of proteasomal hydrolysis. This is not observed in case of Adriase and so, it appeared possible that the aspartate carbonyl group is subsequently transferred to the threonine amino group, forming a stable, regular peptide bond.

[0386] To discriminate between these two scenarios—hydroxyl ester or peptide bond —, a dimethyl labeling experiment (Jhan (2017) Anal Chem 89:4255-4263) was conducted, a method that modifies all free amino groups. For this purpose, the MtrA^{N}-Adriase conjugate band was excised from the SDS-gel shown in FIG. 2A (“Elu”). Following an in-gel tryptic digest (13 ng/μl trypsin, 20 mM ammonium bicarbonate; Borchert (2010) loc. cit.), extracted protein fragments were desalted with C18 StageTips (Rappsilber (2007) Nat Protoc 2:1896-906) and dimethylated (0.16% CH₂O, 22 mM NaBH₃CN, 100 mM TEAB; (Boersema (2009) Nat Protoc 4:484-94)) with an incorporation rate of 91.3%. LC-MS/MS analysis on a Proxeon Easy nano-LC (Thermo) coupled to an LTQ OrbitrapElite mass spectrometer (Thermo). The data were processed using MaxQuant v.1.6.4 (Cox (2008) loc. cit.) spectra searched against a custom peptide database and the Uniprot M. mazei Go1 proteome.

[0387] This analysis showed that dimethyl modifications in the fusion peptide DTLVIAFIGK (SEQ ID NO: 426) were found only at the newly generated aspartate N-terminus and the lysine residue (FIG. 4). By contrast, a methylation of the Adriase threonine, as it would be observed in case of a hydroxyl ester, is not detected. This indicates that its amino group is engaged in a regular amide bond with the MtrA aspartate.

[0388] To further substantiate these results, peptides from the MtrA^{N}-Adriase conjugate gel band were compared quantitatively with peptides from gel bands corresponding to MtrA or Adriase proteins alone. For this purpose, MtrA and Adriase gel bands were excised from the SDS-gel shown in FIG. 2A (“Elu”) and processed just like the MtrA^{N}-Adriase conjugate (see above): Following an in-gel tryptic digest (13 ng/μl trypsin, 20 mM ammonium bicarbonate; Borchert (2010) loc. cit.), extracted protein fragments were desalted with C18 StageTips (Rappsilber (2007) loc. cit.) and dimethylated (0.16% CH₂O, 22 mM NaBH₃CN, 100 mM TEAB; (Boersema (2009) loc. cit.)) with an incorporation rate of 89-92%. For each of the samples, reagents with different isotopes were used in the labeling procedure: CH₂O/NaBH₃CN were used for the MtrA^{N}-Adriase conjugate gel band, resulting in a (CH₃)₂ modification of primary amines (light label); CD₂O/NaBH₃CN were used for the MtrA gel band, resulting in a (CHD2)₂ modification of primary amines (medium label); ¹³CD₂O/NaBD₃CN were used for the Adriase gel band, resulting in a (¹³CD₃)₂ modification of primary amines (heavy label). The samples were then combined and LC-MS/MS analysis on a Proxeon Easy nano-LC (Thermo) coupled to an LTQ OrbitrapElite mass spectrometer (Thermo). The data were processed using MaxQuant v.1.6.4 (Cox (2008) loc. cit.) spectra searched against a custom peptide database and the Uniprot M. mazei Go1 proteome.

[0389] The results of this quantitative analysis (Table 5) support the formation of the MtrA^{N}Adriase conjugate: Peptide fragments corresponding to MtrA^{N} (residues 1-154 (SEQ TD NO: 517)) and Adriase (SEQ ID NO: 107) are abundant in the to MtrA^{N}-Adriase gel band, while fragments corresponding to MtrA^{C} (residues 155-218 (SEQ TD NO: 424)) are only detected at very low levels. Furthermore, just like in the first experiment, no methylation is observed at the threonine within the DTLVIAFIGK (SEQ ID NO: 426) fusion peptide, indicating that its amino group is engaged in a regular amide bond with the MtrA aspartate.

TABLE 5
Adriase forms a covalent conjugate with MtrA^{N} (residues 1-154).
Detected protein fragments in excised polyacrylamide gel bands corresponding to
Adriase (H), MtrA (M) or an MtrA^{N}-Adriase conjugate (L; see FIG. 2A). The samples
were digested with trypsin and dimethylated at primary amine groups (indicated by
asterisks), using different isotopes (H = Heavy; M = Medium; L = Light). Note,
that the relative intensities (normalized to 10000) for a given peptide reflect
quantitative differences between the samples. The band corresponding to MtrA^{N}-
Adriase also contains small amounts of unconjugated MtrA and Adriase proteins,
possibly due to the reversibility of the reaction.

| | | Intensity L | | |
|---|---|---|---|---|
| | Sequence | (MtrA^{N}- | Intensity M | Intensity H |
| Fragment | (* = dimethyl label) | Adriase) | (MtrA) | (Adriase) |
| MtrA 125-146 | *FQEQVQVVNLLDT | 496 | 1137 | 0 |
| | EDMGAITSK* | | | |
| MtrA 154-191 | *DPGAFDADPLVVEI | 0 | 100 | 0 |
| | SEEGEEEEEGGVVRP | | | |
| | VSGEIAVLR | | | |
| MtrA 201-209 | *MMDIGNLNK* | 53 | 10000 | 1 |
| MtrA 149-154 + | *ELASKDTLVIAFIG | 48 | 0 | 0 |
| Adriase 1-9 (amide) | K | | | |
| MtrA 149-154 + | *ELASKD*TLVIAFIG | 0 | 0 | 0 |
| Adriase 1-9 (ester) | K* | | | |
| MtrA D154 + | *DTLVIAFIGK* | 1975 | 0 | 0 |
| Adriase 1-9 (amide) | | | | |
| MtrA D154 + | *D*TLVIAFIGK* | 0 | 0 | 0 |
| Adriase 1-9 (ester) | | | | |
| Adriase 10-19 | *NGAVMAGDMR | 407 | 0 | 1723 |
| Adriase 1-9 | *TLVIAFIGK* | 85 | 1 | 1639 |

[0390] Accordingly, the generated data show that Adriase can form a covalent conjugate with MtrA^{N} by forming a peptide bond between the N-terminal threonine/serine of the active Adriase and the aspartate residue in the conserved KDPGA (SEQ ID NO: 311) motif within the MtrA protein.

### EXAMPLE 5: A SHORT RECOGNITION MOTIF IS SUFFICIENT FOR THE INTERACTION WITH ADRIASE

[0391] In order to further study conjugate formation between MtrA and Adriase, static light scattering (SEC-MALS) experiments were performed using proteins derived from M. jannaschii, a hyperthermophilic organism known for its stable proteins. These results were then further substantiated with MST (Microscale thermophoresis) measurements and a crystal structure of Adriase with a bound substrate.

[0392] For light scattering experiments, 50 μl of the catalytically inactive M. jannaschii Adriase^{S1A} mutant (SEQ ID NO: 386) at 200 μM, 50 μl M. jannaschii MtrA^{Δ194-245} (SEQ ID NO: 420) at 200 μM or a 1:1 molar mixture of the same were injected on a Superdex S200 10/300 GL gel size-exclusion column (20 mM HEPES-NaOH pH 7.5, 50 mM NaCl, 100 mM KCl) coupled to a miniDAWN Tristar Laser photometer (Wyatt) and a RI-2031 differential refractometer (JASCO). Data analysis was carried out with ASTRA v7.3.0.18 software (Wyatt).

[0393] The results depicted in FIG. 5A show that Adriase and MtrA alone display a comparable elution behavior, whereas the mixture of both elutes at a lower volume, indicating complex formation. This interpretation is supported by light scattering measurements (thick lines, plotted on the secondary Y-axis in FIG. 5A). The determined masses (Table in FIG. 5A) closely resemble the theoretical monomeric masses for Adriase and MtrA alone and for a complex formed by one Adriase and one MtrA molecule. Hence, this experiment demonstrated the monomeric nature of both proteins and that MtrA and inactive Adriase form a heterodimer.

[0394] To further investigate, which regions in MtrA are required for this interaction, a similar experiment using a shorter MtrA version, M. jannaschii MtrA^{Δ174-245} was conducted. Specifically, 50 μl of the catalytically inactive M. jannaschii Adriase^{S1A} mutant (SEQ ID NO: 386) at 200 μM, 50 μl M. jannaschii MtrA^{Δ174-245} (SEQ ID NO: 518) at 200 μM or a 1:1 molar mixture of the same were injected on a Superdex S200 10/300 GL gel size-exclusion column (20 mM HEPES-NaOH pH 7.5, 50 mM NaCl, 100 mM KCl) coupled to a miniDAWN Tristar Laser photometer (Wyatt) and a RI-2031 differential refractometer (JASCO). Data analysis was carried out with ASTRA v7.3.0.18 software (Wyatt).

[0395] The results depicted in FIG. 17 show the formation of a Adriase:MtrA^{Δ174-245} heterodimer, just like in the above experiment (FIG. 5A). Accordingly, residues within the truncated C-terminal MtrA element are not necessary for the Adriase-MtrA interaction.

[0396] To substantiate these results, the dissociation constant (K_{D}) for this interaction was determined via MST (Microscale thermophoresis). Specifically, M. jannaschii MtrA^{Δ194-245} (SEQ ID NO: 420) or M. jannaschii MtrA^{Δ174-245} (SEQ ID NO: 518) were fluorescently labeled using the NT-647-NHS kit (Nanotemper). Next, a serial 1:1 dilution of the catalytically inactive M. jannaschii Adriase^{S1A} mutant (SEQ ID NO:386) ranging from 90 μM to 2.7 nM was prepared and mixed with 50 nM labeled M. jannaschii MtrA^{Δ194-245} or 50 nM labeled M. jannaschii MtrA^{Δ174-245} (20 mM HEPES-NaOH pH 7.5, 150 mM NaCl, 50 mM KCl, 0.5 mM TCEP, 0.05% NP40, 0.1 g/l BSA). MST measurements were performed with a Monolith NT.115 (Nanotemper), using various MST power and laser intensity settings to test the general validity of the obtained data. The final results were obtained in three independent experiments and measured at a temperature of 25° C., using MST power 80% and laser intensity 40%. The binding curve shown in FIGS. 5B and 18G were fitted to the data, using the NT Analysis 1.5.41 software (Nanotemper).

[0397] In a second set of MST experiments, a more detailed analysis of the binding motif (FIG. 18A-F and table in FIG. 5B) was performed using synthetic peptides (Genscript) based on the M. jannaschii MtrA sequence. These peptides contained the KDPGA motif plus up to 15 N- and 10 C-terminal residues and were linked to the fluorophore fluorescein-5-isothiocyante (FITC) either N-terminally via aminohexanoic acid (Ahx) or C-terminally via an extra lysine (SEQ ID NOs: 367-372; Table 6). For the MST measurements, 10 nM of these peptides were mixed with a serial dilution of M. jannaschii Adriase^{S1A} and the experiment was otherwise performed as described for the M. jannaschii MtrA^{Δ194-245}-Adriase^{S1A} and the M. jannaschii MtrA^{Δ174-245}-Adriase^{S1A} interactions, above.

TABLE 6

| Peptide | Sequence | SEQ ID NO |
|---|---|---|
| (10)KDPGA(10) | ITQAIKECLSKDPGAIDEDPFIIELK-FITC | 370 |
| (5)KDPGA(10) | KECLSKDPGAIDEDPFIIELK-FITC | 371 |
| (0)KDPGA(10) | KDPGAIDEDPFIIELK-FITC | 372 |
| (15)KDPGA(10) | FITC-Ahx-EDIGKITQAIKECLSKDPGAIDEDPFIIEL | 367 |
| (15)KDPGA(5) | FITC-Ahx-EDIGKITQAIKECLSKDPGAIDEDP | 368 |
| (15)KDPGA(0) | FITC-Ahx-EDIGKITQAIKECLSKDPGA | 369 |

Fluorophore-coupled peptides used for MST analysis

[0398] The results of these experiments as depicted in FIG. 18 and the table of FIG. 5B show that Adriase binds the 20 amino acid motif (5)KDPGA(10) as tightly as M. jannaschii MtrA^{Δ194-245} and that the 15 amino acid motif (0)KDPGA(10) is still bound with sub-micromolar affinity. Accordingly, the data shows that a short recognition motif is sufficient for Adriase binding, even when presented as isolated peptide.

[0399] To support these conclusions, crystal structures of Adriase and of a complex between catalytically inactive Adriase and the (15)KDPGA(10) peptide were determined.

[0400] For this purpose, N-terminally modified Adriase (SEQ ID NO: 450) was purified and processed (yielding SEQ ID NO: 667) as described in Example 1, except for the use of a different gel filtration buffer (20 mM HEPES-NaOH pH 7.5, 150 mM NaCl, 0.5 mM TCEP) and a final concentration of 15 g/l. Crystals were obtained in “sitting drops” by mixing 15 g/l protein with an equal volume of crystallization buffer (100 mM HEPES-NaOH pH 7.5, 70% MPD). Crystals were flash frozen in liquid nitrogen and data collected at 100K at beamline X10SA of the Swiss Light Source (Villigen, Switzerland), using a MarCCD 225 mm CCD detector.

[0401] As the obtained data alone allowed no structure solution, the above experiment was repeated with a Se-Met labeled version of the above protein (SEQ ID NO: 667), which crystallized with a concentration of 6 g/l under the same buffer conditions. Crystals were flash frozen in liquid nitrogen and data collected at 100K at beamline X10SA of the Swiss Light Source (Villigen, Switzerland), using a MarCCD 225 mm CCD detector. All data were indexed, integrated and scaled using XDS (Kabsch (2010) Acta Crystallogr D Biol Crystallogr 66:125-32). After heavy atom localization and density modification with SHELX (Sheldrick (2008) Acta Crystallogr A 64:112-22), substructure refinement with SHARP (Vonrhein (2008) Methods Mol Biol 364:215-30), density modification with Solomon (Abrahams (1996) Acta Cryst D52:30-42) and secondary structure recognition with ARP/WARP (Perrakis (1999) Nat Struct Biol 6:458-63), most of the structure could be traced and built by Buccaneer (Cowtan (2006) Acta Crystallogr D Biol Crystallogr 62:1002-11). The data was refined against the higher-resolution native data (see above) and completed by cyclic manual modeling with Coot (Emsley (2004) Acta Crystallogr D Biol Crystallogr 60:2126-32) and refinement with REFMAC (Murshudov (1999) Acta Crystallogr D Biol Crystallogr 55:247-55).

[0402] The so obtained Adriase structure could in the following be used to solve the structure of a M. jannaschii Adriase^{S1A}-(15)KDPGA(10) complex. The respective crystals were obtained and measured in a similar fashion, except that they grew by mixing an equimolar solution of protein and peptide (SEQ ID NO: 386 and 367; 10.5 g/l in 20 mM HEPES-NaOH pH 7.5, 50 mM NaCl, 0.5 mM TCEP) with crystallization buffer (100 mM MES-NaOH pH 6.0, 200 mM NaCl, 20% PEG2000). Prior to loop-mounting and flash-cooling in liquid nitrogen, crystals were briefly transferred to a droplet of crystallization buffer supplemented with 20% glycerol for cryoprotection. Diffraction experiments were performed at 100K and a wavelength of 1 Å at beamline X10SA, using a Pilatus 6M-F hybrid pixel photon counting detector. Data were indexed, integrated and scaled using XDS, yielding a dataset in space group P2₁2₁2₁ with a resolution cutoff at 3.05 Å. The complex structure was solved by molecular replacement with MOLREP (Vagin (2000) Acta Crystallogr D Biol Crystallogr 56:1622-4) using the above described structure of SeMet-labeled M. jannaschii Adriase as a search model and subsequent refinement with Coot and REFMAC.

[0403] The obtained crystal structure of the (15)KDPGA(10)-Adriase^{S1A} complex (FIG. 6) shows that the helix preceding the KDPGA motif is not crucial for the interaction, while the KDPGA residues and the ten amino acid residues following the motif are bound via beta-sheet interactions. This result supports the conclusion, that a small amino acid motif, such as (5)KDPGA(10), is sufficient for a high affinity interaction with Adriase.

### EXAMPLE 6: ADRIASE MODIFICATIONS ARE REVERSIBLE AND ALLOW THE RECOMBINATION OF SUBSTRATES VIA THE ADRIASE RECOGNITION MOTIF

[0404] To test the kinetics MtrA^{N}-Adriase conjugate formation, Adriase (SEQ ID NO: 385) and MtrA from M. jannaschii (SEQ ID NO: 420) were recombinantly expressed, purified and subjected to a time course experiment analyzing the reaction between Adriase and MtrA over time. Specifically, 14 μM of M. jannaschii Adriase (SEQ ID NO: 385) and M. jannaschii MtrA^{Δ194-245} (SEQ ID NO:420) were mixed in buffer A (20 mM HEPES-NaOH pH 7.5, 100 mM NaCl, 50 mM KCl, 0.5 mM TCEP) at room temperature. The reaction was stopped by addition of 2% SDS at the time points indicated in FIG. 7A and the samples analyzed via SDS-PAGE.

[0405] Surprisingly, a nearly constant fraction of MtrA^{N} was conjugated to Adriase that did not change significantly over time (FIG. 7A). This finding suggests that the reaction of Adriase and MtrA is reversible, resulting in an equilibrium between unmodified and modified MtrA. In the reverse Adriase reaction, MtrA^{C} would react with MtrA^{N}-Adriase, yielding unmodified MtrA^{NC} and Adriase.

[0406] To test hypothesis, the above experiment was repeated in the presence of a second, artificial Adriase substrate, namely ubiquitin (Ub) C-terminally fused to the Adriase recognition motif KDPGA(10) (i.e. KDPGA and the ten following amino acids (SEQ ID NO: 392)). Specifically, 14 μM of M. jannaschii Adriase (SEQ ID NO: 385), M. jannaschii MtrA^{Δ194-245} (SEQ ID NO:420) and Ub-KDPGA(10) were mixed in buffer A (20 mM HEPES-NaOH pH 7.5, 100 mM NaCl, 50 mM KCl, 0.5 mM TCEP) at room temperature. The reaction was stopped by addition of 2% SDS at the time points indicated in FIG. 7B and the samples analyzed via SDS-PAGE.

[0407] As predicted, Adriase reacts with both substrates to form MtrA^{N}-Adriase (SEQ ID NO: 434) and Ub^{N}-Adriase (Predicted SEQ ID NO: 433) and remove the respective C-terminal fragments (MtrA^{C}, Ub^{C}; FIG. 7B). In the reverse reaction, the C-terminal fragments then react with both Adriase conjugates (MtrA^{N}-Adriase, Ub^{N}-Adriase), producing the fusion proteins MtrA^{N}-Ub^{C} (SEQ ID NO: 427) and Ub^{N}-MtrA^{C} (SEQ ID NO: 428), respectively (FIG. 7B-D).

[0408] To verify these findings, the observed recombination was also analyzed via LCMS. Specifically, 0.5 g/l of M. jannaschii Adriase (SEQ ID NO:385), 0.5 g/l M. jannaschii MtrA Δ194-245 (SEQ ID NO: 420) and 0.5 g/l Ub-KPDGA(10) (SEQ ID NO: 392) were incubated over night at room temperature in the same buffer (20 mM HEPES-NaOH pH 7.5, 100 mM NaCl, 50 mM KCl, 0.5 mM TCEP). Desalted samples were subjected to a Phenomenex Aeris Widepore 3.6 μm C4 200 Å (100×2.1 mm) column, eluted with a 30-80% H2O/acetonitrile gradient over 15 min in the presence of 0.05% trifluoroacetic acid and analyzed with a Bruker Daltonik microTOF. Data processing was performed with Bruker Compass DataAnalysis 4.2 and the m/z deconvoluted with the MaxEnt module to obtain the protein mass.

[0409] The observed spectra (FIG. 7C-D) confirm the Adriase-catalyzed recombination of MtrA and Ub-KDPGA(10) via the Adriase recognition motif, resulting in the “chimeric” fusion proteins MtrA^{N}-Ub^{C} (SEQ ID NO: 427) and Ub^{N}-MtrA^{C} (SEQ ID NO: 428). Accordingly, the formation of the covalent peptide bond between Adriase and MtrA^{N} is indeed reversible, enabling the post-translational recombination and/or ligation of two substrates. This shows that the KDPGA(10) motif is sufficient for Adriase to act on a given substrate protein such as ubiquitin.

[0410] Based on the above experiments, a catalytic mechanism for the Adriase reaction can be deduced (FIG. 8). In brief, active Adriase bearing an N-terminal serine or threonine residue reacts with a substrate protein having the conserved KDPGA recognition motif, cleaves the same between the aspartate (D) and proline (P) residues and forms a new peptide bond between the aspartate and its N-terminus. The reaction releases the C-terminal portion of the substrate protein bearing the PGA sequence as N-terminus. This process is reversible so that either the original C-terminal portion or a different molecule with the PGA sequence can react with the Adriase-substrate^{N} conjugate to restore the substrate protein. Thus, Adriase has peptide recombinase or transpeptidase activity allowing post-translational fusion of protein portions.

[0411] Chemically, the proposed catalytic mechanism of the Adriase recombination is a completely unexpected combination of two known proteasomal reactions, hydrolysis and autolysis (Huber (2016) loc. cit.). As depicted in FIG. 8, the reversible Adriase reaction is proposed to differ from proteolysis/autolysis only by avoiding the irreversible hydrolysis step (bottom). Hydrolysis products could not be identified in any of the shown mass spectrometrical analyses of the Adriase reaction (see also Example 11).

### EXAMPLE 7: KINETICS OF THE M. JANNASCHII ADRIASE REACTION

[0412] Example 6 showed that Adriase can recombine two proteins via the (X₁)KDPGA(X₂) motif, by exchanging the respective PGA(X₂) fragments (FIG. 16A). Considering the proposed mechanism (FIG. 8), the same reaction using (X₁)KDPGA(X₂) as primary and PGA(X₃) as secondary substrate should further promote the formation of the fusion peptide, because more Adriase is available and the number of possible reactions is decreased (FIG. 16B).

[0413] To test this assumption, the Adriase reaction was performed with (X₁)KDPGA(X₂) peptides bearing a C-terminal fluorophore (SEQ ID NOs: 370-371 and 418; see also Table 6) and unmodified PGA(X₃) synthetic peptides (SEQ ID NOs: 373-375; see Table 7) as model substrates. The recombination reaction is expected to result in the formation of a (X₁)KDPGA(X₃) fusion peptide, releasing the respective C-terminal peptides PGA(X₂) (SEQ ID NOs: 414) with the C-terminal fluorescent label. The latter can be visualized in order to track the progress of the reaction.

TABLE 7
Secondary substrates used for ligation rate
analysis.

| Peptide | Sequence | SEQ ID NO |
|---|---|---|
| PGA(17) | PGAIDEDPFIIELEGGKGGG | 373 |
| PGA(10) | PGAIDEDPFIIEL | 374 |
| PGA(8) | PGAIDEDPFI | 375 |

[0414] Specifically, 100 nM M. jannaschii Adriase were added to optimized Adriase buffer (20 mM MES-NaOH pH 5.8, 150 mM NaCl, 100 mM KCl, 5 mM TCEP-HCl), incubated with or without 60 μM fluorophore-coupled primary (SEQ ID NOs: 370-371 and 418; see Table 6) and 100 μM non-fluorescent secondary substrates (SEQ ID NO: 373-375; see Table 7) in the combinations as indicated in FIG. 9A. The reaction was performed for 8 min at 85° C. and stopped by addition of 2% SDS. Samples were then separated on 12% polyacrylamide gels (Thermo) and fluorescent products visualized by UV light.

[0415] FIG. 9A shows that the substrate (F15)KDPGA(10) with SEQ ID NO: 367 (lane 2-4) forms a covalent bond to Adriase ((F15)KD-Adriase; SEQ ID NO: 429), resulting in the release of non-fluorescent PGA(10) with SEQ ID NO: 374 (not visible due to the lack of a fluorescent label); In presence of PGA(17) (SEQ ID NO: 373), (F15)KDPGA(10) (SEQ ID NO: 367) is recombined to (F15)KDPGA(17) (SEQ ID NO: 413). Substrates with C-terminal fluorophores (lane 5-13) also form covalent bonds to Adriase (non-fluorescent), resulting in the release of small quantities of PGA(10F) (SEQ ID NO: 414); In presence of PGA(17) (SEQ ID NO: 373), non-fluorescent ligation products (15/10/5)KDPGA(17) (SEQ ID NOs: 415-417, respectively) and more PGA(10F) are formed.

[0416] These experiments show that PGA(X) can be used as secondary substrate, supporting the proposed reaction mechanism (FIG. 8). They also show that fluorescent peptides are useful to assay the characteristics of Adriase-mediated ligations. In the following, they are used to determine Adriase ligation rates (FIG. 9B).

[0417] For this purpose, ligations were performed and visualized as described above, except for the use of just 6 nM Adriase and the increasing concentrations of (15)KDPGA(10F) (SEQ ID NO: 418) and PGA(10) (SEQ ID NO: 374) peptides (2.5/5/10/20/40/80/160 μM of each peptide of the peptide pairs). The band intensity of the respectively fluorescently labeled PGA(10F)-peptide (see SEQ ID NO: 414), which is released by the ligation reaction was quantified using ImageJ v1.50i and subtracted from background signal in control reactions without PGA(10) peptide.

[0418] The determined values are shown in FIG. 9B. While it is unclear, whether the assayed Adriase reaction follows classical Michaelis-Menten kinetics, the determined ligation rates are well described by the Michaelis-Menten equation (black line in FIG. 9B). Thus, the Michaelis-Menten model as implemented in SigmaPlot v12.3 was used to approximate the maximum rate of ˜1.4 ligations per enzyme and second. The half maximal reaction speed is observed at a substrate concentration of 23 μM each. Thus, thanks to its high affinity and reaction rate, nanomolar concentrations of Adriase efficiently catalyze ligations within minutes, even at low substrate concentrations, making Adriase an attractive choice for a wide range of applications.

[0419] To determine how the reaction is influenced by recognition motif characteristics, ligation rates for other substrates were determined in the same manner, except for the use of 20 μM of the indicated substrates (see also Tables 6 and 7) and varying concentrations of Adriase (6/30/150/750 nM). The results (FIG. 9C) show that M. jannaschii Adriase efficiently ligates (X₁)KDPGA(X₂) and PGA(X₃) peptides with X₁>5 and X₂=X₃≥10. In combination with the above experiments (FIGS. 9A and B), they provide the means to design substrates for efficient Adriase-mediated ligations.

### EXAMPLE 8: SEQUENCE DETERMINANTS GOVERNING ADRIASE ACTIVITY

[0420] To understand the role of Adriase sequence characteristics, experiments with a set of mutants were conducted. First, the function of the OB-like domain, which is found in a subset of Adriase proteins (SEQ ID NOs: 144 to 225), including the here studied M. jannaschii Adriase, was studied. For this purpose, size exclusion chromatography using 50 μl 200 μM M. jannaschii Adriase^{ΔOB} (SEQ ID NO: 132), M. jannaschii MtrA^{Δ194-245} (SEQ ID NO:420) or a 1:1 molar mixture of the Adriase-MtrA pair was analyzed using a Superdex S200 10/300 GL gel size-exclusion column (20 mM HEPES-NaOH pH 7.5, 50 mM NaCl, 100 mM KCl) coupled to a miniDAWN Tri star Laser photometer (Wyatt).

[0421] The results of these analyses (FIG. 10A) show that the elution profile of the mixture is identical to the combined profiles of its isolated components. Consequently, Adriase^{ΔOB} has a lower affinity for MtrA^{Δ194-245} compared to the full-length enzyme (FIG. 5A).

[0422] To investigate, whether the OB fold alone is sufficient to bind Adriase in the above experimental set-up, we repeated the same analysis using M. jannaschii Adriase^{ΔNTN} (SEQ ID NO: 519). Specifically, size exclusion chromatography using 50 μl 200 μM M. jannaschii Adriase^{ΔNTN} (SEQ ID NO: 519), M. jannaschii MtrA^{Δ194-245} (SEQ ID NO:420) or a 1:1 molar mixture of the Adriase-MtrA pair was analyzed using a Superdex S200 10/300 GL gel size-exclusion column (20 mM HEPES-NaOH pH 7.5, 50 mM NaCl, 100 mM KCl) coupled to a miniDAWN Tristar Laser photometer (Wyatt).

[0423] Just like in the above assay, the elution profile of the mixture is identical to the combined profiles of its isolated components (FIG. 19). Consequently, both NTN and OB domain contribute to the high-affinity interaction between M. jannaschii Adriase and MtrA (FIG. 5A).

[0424] In a second set of experiments, the ligase activity of Adriase variants was tested with (15)KDPGA(10) (SEQ ID NO: 419) and PGA(10F) (SEQ ID NO:414) substrates. These included M. jannaschii Adriase^{ΔOB} (SEQ ID NO: 387), a variant with a deletion of an insertion that distinguishes Adriase from proteasome subunits (M. jannaschii Adriase^{Δ28-57}; SEQ ID NO: 388; see also FIG. 1), an active site mutant (M. jannaschii Adriase^{S1A}; SEQ ID NO: 386), and a variant that lacked a free amino group at the active site serine (N-His, SEQ ID NO: 450). Furthermore, M. mazei Adriase (SEQ ID NO: 380) was tested for ligase activity with the same M. jannaschii peptide substrates to assess whether variety within the recognition motif is tolerated. The read out for Adriase activity was the detection of fluorescently labeled ligation product (10)KDPGA(10F) (SEQ ID NO: 418).

[0425] Specifically, 100 nM of the M. jannaschii Adriase variants (SEQ ID NO: 385-388 and 450) or the M. mazei Adriase (SEQ ID NO: 380) were incubated with or without 15 μM (15)KDPGA(10) (SEQ ID NO: 419) and 15 μM fluorophore-coupled PGA(10F) (SEQ ID NO: 374) substrates. The reaction was performed in optimized M. jannaschii Adriase buffer (20 mM MES-NaOH pH 5.8, 150 mM NaCl, 100 mM KCl, 5 mM TCEP-HCl) for 8 min at 85° C. when M. jannaschii derived Adriase variants were used and at 50° C. in optimized M. mazei Adriase buffer (50 mM acetic acid, 50 mM MES, 50 mM HEPES, 100 mM NaCl, 50 mM KCl, 5 mM TCEP, pH 7.0) when M. mazei Adriase was used and stopped by addition of 2% SDS. Samples were then separated on 12% polyacrylamide gels (Thermo) and fluorescent products visualized by UV light.

[0426] The results as depicted in FIG. 10B show that Adriase^{ΔOB} is still catalytically active because it catalyzed the ligation of (10)KDPGA(10F). Hence, while the OB-like domain increases affinity for MtrA, it is not required for ligations via the Adriase recognition motif By contrast, deletion of the insertion that distinguishes Adriase from proteasome subunits (Δ28-57, see FIG. 1) abolishes ligase activity. Likewise, no ligation product is observed for an active site mutant (S1A) and the N-terminally modified Adriase version (N-His), suggesting that both the serine hydroxyl and the unmodified serine amino group are required for efficient ligations (FIG. 8). Interestingly, also M. mazei Adriase showed activity when incubated with the M. jannaschii derived peptides indicating that sequence variability in the regions upstream and downstream of the conserved KDPGA (SEQ ID NO: 315-366, 460-510 and 551-661) motif of the recognition motif is tolerated by the enzyme. The corresponding MtrA proteins of both organisms share only 47% and 40% sequence identity in the 15 residues upstream or 10 residues downstream of the KDPGA motif. Consequently, a given Adriase enzyme may be cross-functional with Adriase recognition motifs derived from other organisms.

[0427] To investigate the effect of the OB domain on Adriase ligation kinetics in more detail, the time course of such a ligation was recorded for both full length Adriase and Adriase^{ΔOB}.

[0428] Specifically, in three independent experiments, 100 μM M. jannaschii MtrA-derived His₆-Ub-(5)KDPGA(10) (SEQ ID NO: 526) and PGA(15)-Ub-His₆ (SEQ ID NO: 527) substrates were incubated with 0.0025 molar equivalents of full-length M. jannaschii Adriase (SEQ ID NO: 385) or Adriase^{ΔOB} (SEQ ID NO: 387) in optimized M. jannaschii Adriase buffer (20 mM MES-NaOH pH 5.8, 150 mM NaCl, 100 mM KCl, 5 mM TCEP-HCl) at 85° C. At various time points (0 s, 28 s, 55 s, 88 s, 126s, 171 s, 225 s, 295 s, 393 s, 554s, 1125 s, 1670s and 2250 s), an aliquot of the reaction was mixed with 2% SDS. Samples were then separated on 12% polyacrylamide gels (Thermo) and stained with Coomassie blue (FIG. 20A). The band intensities of educt and product bands were quantified using ImageJ v1.52a, assuming that all ubiquitin molecules bind the coomassie dye in a similar manner. The results were then used to plot the time courses for each experiment (FIG. 20B).

[0429] The results (FIG. 20) show that both Adriase and the shortened version Adriase^{ΔOB} catalyze the ligation at similar rates, suggesting that, although it may assist in binding MtrA, the OB domain does not greatly affect the ligation of other protein substrates bearing the Adriase recognition motif.

### EXAMPLE 9: LIGATION RATE AND COMPLETENESS CAN BE CONTROLLED VIA SUBSTRATE RATIOS

[0430] The so far presented results suggest a reversible ordered ping-pong mechanism for Adriase ligations, in which both primary (X₁)KDPGA(X₂) and secondary PGA(X₃) substrates bind at the same site (FIG. 6). In a first step, the primary substrate modifies the Adriase catalytic Ser/Thr and PGA(X₂) is released (FIG. 8). This process should be accelerated by high primary substrate concentrations but inhibited by high secondary substrate concentrations, as the latter cannot be utilized upon binding to the unmodified enzyme. In a second step, the modified Adriase enzyme reacts with the secondary substrate—a process that should by accelerated by high secondary substrate concentrations. Consequently, the ratio between primary and secondary substrates is an important reaction parameter.

[0431] To study this parameter in more detail, 6 nM M. jannaschii Adriase (SEQ ID NO: 385) in optimized buffer (20 mM MES-NaOH pH 5.8, 150 mM NaCl, 100 mM KCl, 5 mM TCEP-HCl) was incubated with various substrate ratios: In a first experiment, the 20 μM secondary PGA(10) (SEQ ID NO: 374) substrate and varying concentrations (2.5-160 μM) of primary (15)KDPGA(10F) (SEQ ID NO: 418) were used (FIG. 11A); In a second experiment, 20 μM (15)KDPGA(10F) and varying concentrations (2.5-160 μM) of PGA(10) were used (FIG. 11B). The reactions were performed for 7 min at 85° C. and stopped by addition of 2% SDS. Samples were then separated on 12% polyacrylamide gels (Thermo) and fluorescent products visualized by UV light. The band intensity of the respective fluorescently labeled PGA(10F) peptides (SEQ IDs NO: 414), which were released by the ligation reactions were quantified using ImageJ v1.50i and subtracted from background signal in control reactions without PGA(10) peptides.

[0432] Interestingly, while the ligation rate is generally higher at higher primary substrate concentrations (FIG. 11A), high secondary substrate concentrations appear to inhibit the reaction (FIG. 11B). Instead, for the highest ligation rates, both substrates should be used at equimolar ratio. Nevertheless, different substrate ratios may find use where complete ligation of one reaction partner is desired, for example tagging a protein with a fluorophore. In these cases, product formation could be driven by using excess concentrations of the fluorophore. If Adriase binds both substrates equally well, the effect of their ratio on the proportion of ligated protein at the equilibrium should be described by the following formula:

$$Substrate ratio = Ligation product ratio + \frac{Ligation product {ratio}^{2}}{1 - Ligation product ratio}$$

[0433] To test this assumption, the above experiment, which analyzed ligation rates at the start of the reaction, was performed with much higher Adriase concentrations. This way, product quantities at the reaction equilibrium could be studied. Specifically, 0.5 μM of M. jannaschii Adriase (SEQ ID NO: 385) in optimized buffer (20 mM MES-NaOH pH 5.8, 150 mM NaCl, 100 mM KCl, 5 mM TCEP-HCl) were incubated with 30 μM (15)KDPGA(10F) (SEQ ID NO: 418) and varying concentrations (1.875-480 μM) of PGA(10) (SEQ ID NO: 374). The reactions were performed for 10 min at 85° C. and stopped by addition of 2% SDS. Samples were then separated on 12% polyacrylamide gels (Thermo) and fluorescent products visualized by UV light. The band intensity of the respective fluorescently labeled PGA(10F) peptides (SEQ IDs NO: 414), which were released by the ligation reactions were quantified using ImageJ v1.50i and subtracted from background signal in control reactions without PGA(10) peptides.

[0434] The results (FIG. 11C) show that the above equation (solid line) can be used to estimate the amount of ligated product and thus serve as a guideline when designing a ligation experiment in which Adriase binds both substrates equally well. In this case, for instance 90% of a given protein can be ligated to a substrate added in nine fold excess:

$$9 = 0.9 + \frac{0 . {9}^{2}}{1 - 0.9}$$

### EXAMPLE 10: TIME COURSE OF THE ADRIASE REACTION

[0435] Because Adriase reactions are reversible, the observed product formation proceeds fastest at the beginning of the reaction and then gradually slows down as the equilibrium is approximated. At a given time (t), the observed reaction rate can be described by the following formula:

$$observed rate at t = maximum rate \times ( 1 - \frac{Product concentration at t}{Maximum product concentration} )$$

where the “maximum product concentration” is the concentration at the equilibrium (i.e. usually 50% when using equimolar substrates). The amount of ligation product can be calculated by integrating these rates over time:

Ligated product=∫_{t_start}^{t_end}observed rate at t*dt

[0436] Both formula can be combined to:

$$Ligated product = {\int }_{{t}_{-} s t a r t}^{{t}_{-} end} [ maximum rate ] * ( 1 - \frac{Product concentration at t}{Maximum product concentration} ) * d t$$

[0437] Using these formulae, the time course of an Adriase reaction with known maximum ligation rate can be predicted. Conversely, the maximum ligation rate can be determined by recording the time course. To test these assumptions, the time course of Adriase ligations was recorded for various concentrations and compared to the above models.

[0438] Specifically, different concentrations (1.25 μM, 2.5 μM, 5 μM, 10 μM, 20 μM or 40 μM) of (5)KDPGA(10F) (SEQ ID NO: 453) and PGA(10) (SEQ ID NO: 454; synthesized by Genscript) substrates were incubated with 0.001 molar equivalents of M. mazei Adriase (SEQ ID NO: 380) in reaction buffer (50 mM acetic acid, 50 mM MES, 50 mM HEPES, 100 mM NaCl, 50 mM KCl, 5 mM TCEP, pH 7.0) at 50° C. At various time points (0 s, 37 s, 79 s, 126 s, 180 s, 244 s, 322 s, 423 s, 561 s and 791 s), an aliquot of the reaction was mixed with 2% SDS. Samples were then separated on 12% polyacrylamide gels (Thermo) and fluorescent products visualized by UV light. The band intensity of the respective fluorescently labeled PGA(10F) peptides (SEQ ID NO: 455), which were released by the ligation reactions were quantified using ImageJ v1.50i and subtracted from background signal in control reactions without PGA(10) peptides.

[0439] As depicted in FIG. 12A, the above models fit the determined data well and allow the determination of the maximum ligation rate at a given substrate concentration. Using the Michaelis-Menten model as implemented in SigmaPlot v12.3 (FIG. 12B), these data can be used to approximate a maximum rate of ˜2.25 ligations per enzyme and second. The half maximal reaction speed is observed at a substrate concentration of ˜9 μM each. Thus, M. mazei Adriase displays similar but slightly more favorable characteristics compared to M. jannaschii Adriase (FIG. 9). In light of the high degree of sequence diversity between both variants (35% sequence identity), these results suggest that the findings presented so far hold true for a wide range of very different Adriase proteins.

[0440] To investigate, how the above peptide-peptide ligation rates compare to protein-protein ligations, experiments using the protein substrates Ub-(5)KDPGA(15) (SEQ ID NO: 520) and PGA(15)-Ub (SEQ ID NO: 521) were conducted.

[0441] Specifically, different concentrations (0.39 μM, 0.78 μM, 1.56 μM, 3.13 μM, 6.25 μM, 12.5, 25, 50 or 100 μM; three independent experiments per concentration) of Ub-(5)KDPGA(15) (SEQ ID NO: 520) and PGA(15)-Ub (SEQ ID NO: 521) substrates were incubated with 0.0025 molar equivalents of M. mazei Adriase (SEQ ID NO: 380) in reaction buffer (50 mM acetic acid, 50 mM MES, 50 mM HEPES, 100 mM NaCl, 50 mM KCl, 5 mM TCEP, pH 7.0) at 50° C. At various time points (0 s, 28 s, 55 s, 88 s, 126 s, 171 s, 225 s, 295 s, 393 s, 554 s, 1125 s, 1670s and 2250 s), an aliquot of the reaction was mixed with 2% SDS. Samples were then separated on 12% polyacrylamide gels (Thermo) and stained with Coomassie blue (FIG. 21A). The band intensities of educt and product bands were quantified using ImageJ v1.52a, assuming that all ubiquitin molecules bind the coomassie dye in a similar manner. The results were used to plot the time courses for each experiment (FIG. 21B). Using the above described formula

$$Ligated product = {\int }_{{t}_{-} s t a r t}^{{t}_{-} end} [ maximum rate ] * ( 1 - \frac{Product concentration at t}{Maximum product concentration} ) * dt ,$$

the data fit for each time course allowed the determination of the maximum rate parameter for each concentration. These maximum rates were then used in a Michaelis-Menten plot (FIG. 21C) to approximate kinetic measures.

[0442] According to the resulting Michaelis-Menten plot (FIG. 21C), M. mazei Adriase catalyzes the above protein-protein ligation at a maximum rate of 0.92 ligations per enzyme and second; the half-maximum rate is observed at a substrate concentration of 2.2 μM each. These values are overall comparable with the parameters determined for the peptide-peptide ligation (FIG. 12) and show that Adriase is capable of catalyzing protein-protein ligations at high rates, even with low substrate concentrations.

### EXAMPLE 11: M. MAZEI ADRIASE DOES NOT HYDROLYZE ITS SUBSTRATES

[0443] Although protein ligase enzymes are generally rare in nature, Adriase shares this functionality with a few other representatives, such as Sortase (Pishesha (2018) Annu Rev Cell Dev Biol 34:163-188) or Butelase (Nguyen (2014) Nat Chem Biol 10:732-8). All known protein ligases, however, use thio- or hydroxylesters as reaction intermediates that are prone to hydrolysis. The irreversible nature of this side-reaction necessitates timely removal of the protein ligase. Adriase is thought also to use a hydroxylester as a reaction intermediate (FIG. 8, Step 1), which is, however, subsequently stabilized via amide bond formation (FIG. 8, Step 2). To check, whether the Adriase intermediate is subject of a hydrolysis side reaction, the Adriase reaction was analyzed at high concentrations for several hours. The results were then compared to the predicted hydrolysis product (F10)KD, which would be formed upon hydrolysis of the (F10)KD-Adriase intermediate.

[0444] Specifically, 15 μM (F10)KDPGA(10) (SEQ ID NO: 456) and 15 μM PGA(25) (SEQ ID NO: 457) were incubated with either 15 nM or 15 μM M. mazei Adriase (SEQ ID NO: 380) in optimized buffer (50 mM acetic acid, 50 mM MES, 50 mM HEPES, 100 mM NaCl, 50 mM KCl, 5 mM TCEP, pH 7.0) at 37° C. In a control reaction, the predicted hydrolysis product, (F10)KD (SEQ ID NO: 458) was incubated under the same conditions with 15 μM Adriase (Hydrolysis control). The lower incubation temperature compared to example 10 was chosen to avoid denaturation of the enzyme. After 12 s, 0.5 h, 1 h, 2 h and 4 h, aliquots were removed and mixed with 2% SDS to stop the reaction. Samples were then separated on 12% polyacrylamide gels (Thermo) and fluorescent products visualized by UV light.

[0445] The resulting gel (FIG. 13) shows the generation of the ligation product (F10)KDPGA(25) (SEQ ID NO: 459). The experiment with just 15 nM Adriase shows that this product is formed over the entire 4 h period, suggesting that the enzyme does not denaturate under these conditions. A band at the height of the hypothetical hydrolysis product, (F10)KD, is not observed. This is true even for 1000× increased Adriase concentrations (15 μM) and when the gel is overexposed for maximum sensitivity (lower panel in FIG. 13). Moreover, the amount of ligation product (F10)KDPGA(25) does not decrease over time, as it would be expected if its reversible generation competed with an irreversible hydrolysis side reaction. Together, these results show that M. mazei Adriase does not hydrolyze its substrates and hence does not have to be removed after ligations to avoid product loss.

[0446] To investigate, whether this characteristic also holds true with protein substrates, the above experiment was repeated with Ub-(5)KDPGA(15)-Strep substrate (SEQ ID NO: 522). Specifically, 25 μM Ub-(5)KDPGA(15)-Strep and 25 μM PGA(10) (SEQ ID NO: 454) were incubated with either 25 nM or 25 μM M. mazei Adriase (SEQ ID NO: 380) in optimized buffer (50 mM acetic acid, 50 mM MES, 50 mM HEPES, 100 mM NaCl, 50 mM KCl, 5 mM TCEP, pH 7.0) at 50° C. After 140 s, 320 s, 575 s, 1002 s, 30 min or 90 min, aliquots were removed and mixed with 2% SDS to stop the reaction. Samples were then separated on 12% polyacrylamide gels (Thermo) and their migration behaviour compared to that of the putative hydrolysis product Ub-(5)KD (SEQ ID NO: 523) and to that of the educts (0 s).

[0447] The resulting gel (FIG. 22) shows the time-dependent formation of the reaction product Ub-(5)KDPGA(10) (SEQ ID NO: 524) in the sample with low Adriase concentrations (25 nM/1×), while no band at the height of the putative hydrolysis product Ub-(5)KD is visible. Even at prolonged incubation times (90 min) and 1000× increased Adriase concentrations, the amount of ligation product remains constant at ˜50% and no hydrolysis product is visible. In agreement with the first experiment, this result show that Adriase does not possess hydrolase activity, neither towards peptides, nor towards proteins.

### EXAMPLE 12: A GENERAL TEST TO EVALUATE ADRIASE LIGATION EFFICIENCY

[0448] The results presented in example 10 suggest that all Adriase proteins share similar characteristics despite being encoded by very divergent sequences. It is therefore possible to suggest a general test to evaluate the efficiency of a given Adriase variant.

[0449] Step 1: Design of primary and secondary substrates. Suitable substrates are for instance (15)KDPGA(10) and PGA(10F) sequences derived from the respective Adriase recognition motif (SEQ ID NO: 315-366, 460-510 and 551-661). The fluorophore FITC (F; Fluorescein-5-isothiocyanate) can be linked to the amino group of an extra lysine at the C-terminus. Synthesis of these compounds is offered by various companies; the ones used in the above experiments were produced by Genscript.

[0450] Step 2: Set-up of the ligation reactions. As a starting point, 15 μM primary substrate, 15 μM secondary substrate and various Adriase concentrations, ranging from 0 μM (control) to 15 μM, should be used. The reaction should be performed for 8 min, preferably at physiological conditions (see appended Table 1 for known optimal growth conditions of Adriase organisms).

[0451] Step 3: Visualization of the reactions. Ligations of the above substrates can be monitored by UV exposure of SDS gels. For the above experiments, 7.5 μl of the above reactions (Step 2) were mixed with 2.5 μl sample buffer (200 mM Tris-HCl pH 6.8, 8% SDS, 0.4% bromophenol blue, 40% glycerol) and applied them to 12% Bis-Tris gels (Thermo) with MES running buffer (50 mM MES, 50 mM Tris, 0.1% SDS, 1 mM EDTA, pH 7.3). After running the gels according to the manufacturer's instructions, they were imaged using a Vilber Lourmat Fusion SL instrument and the UV fluorescence autoexposure option within the FusionCapt Advance SL2 Xpress software. If subsequent quantification of the reaction products is desired, it is important to avoid overexposure. If educts and products cannot be discriminated by their SDS-PAGE migration behavior, other methods, such as size-exclusion chromatography or mass spectroscopy, may be employed.

[0452] Step 4: Interpretation of the results. In case of a successful ligation, a specific product (i.e. (15)KDPGA(10F) with the suggested substrates) can be observed on the gel. The formation of this product can then be quantified using a variety of densitometric tools, such as ImageJ v1.50i. Densitometry is a well-established technique (Gassmann (2009) Electrophoresis 30:1845-55) (Tan (2008): Opt. Commun. 281:3013-3017), allowing the evaluation of Adriase ligation efficiencies. It relies on the quantification of pixel grayscales (0-255) in the individual gel lanes. When these are plotted (signal vs location), fluorescent peptide bands show as peaks. After subtraction from background signals, the integral of these peaks is proportional to the respective peptide quantity.

### EXAMPLE 13: AN UNMODIFIED AMINO GROUP AT THE ADRIASE ACTIVE SITE SER/THR IS REQUIRED FOR EFFICIENT LIGATIONS

[0453] To exemplify the above procedure (Example 12), Adriase variants with and without N-terminal modification were analysed. In example 9, ligase activity was only observed for Adriase variants with exposed amino group at the active site, highlighting its significance in the reaction mechanism (FIG. 8). To study the role of this group in more detail, a re-analysis of N-terminally modified Adriase at far higher concentrations was performed.

[0454] Specifically, 15 μM of (15)KDPGA(10) (SEQ ID NO: 419) and 15 μM of fluorophore-coupled PGA(10F) (SEQ ID NO: 374) substrates were incubated optimized M. jannaschii Adriase buffer (20 mM MES-NaOH pH 5.8, 150 mM NaCl, 100 mM KCl, 5 mM TCEP-HCl) for 8 min at 80° C. with either various Adriase concentrations. The assay was performed with either 7 nM, 21 nM, 62 nM, 185 nM, 556 nM, 1666 nM, 5000 nM or 15000 nM N-terminally modified Adriase (N-His, SEQ ID NO: 450) or 0 nM, 7 nM, 21 nM or 62 nM unmodified Adriase (SEQ ID NO: 385) and stopped by addition of 2% SDS. Samples were then separated on 12% polyacrylamide gels (Thermo) and fluorescent products visualized by UV light.

[0455] The resulting SDS-gel (FIG. 14) visualizes the generation of the fluorescent reaction product (15)KDPGA(10F) (SEQ ID NO: 418), accompanied by a decrease of PGA(10F) substrate. While no activity for N-terminally modified Adriase is observed at low concentrations (see also FIG. 10), this variant retains a ˜200× decreased activity that only becomes apparent at high concentrations. This residual activity was surprising, as an exposed amino group at the active site was considered essential for catalysis (FIG. 8). To investigate this phenomenon, an LCMS analysis was performed.

[0456] Specifically, 0.5 g/l N-terminally modified M. jannaschii Adriase (SEQ ID NO: 450) was desalted and subjected to a Phenomenex Aeris Widepore 3.6 μm C4 200 Å (100×2.1 mm) column, eluted with a 30-80% H₂O/acetonitrile gradient over 15 min in the presence of 0.05% trifluoroacetic acid and analyzed with a Bruker Daltonik microTOF. Data processing was performed with Bruker Compass DataAnalysis 4.2 and the m/z deconvoluted with the MaxEnt module to obtain the protein mass.

[0457] The analysis (FIG. 15) reveals the expected mass for N-terminally modified Adriase without the start-methionine in the main peak (Δ1; SEQ ID NO: 511). In addition, considerably smaller peaks for the same protein, lacking the first 8 (Δ8; SEQ ID NO: 512), 10 (Δ10; SEQ ID NO: 513), 11 (Δ11; SEQ ID NO: 514) or 21 (Δ21; SEQ ID NO: 515) residues were automatically assigned by the Bruker Compass DataAnalysis software. This pattern suggests a small degree of non-specific degradation at the unstructured N-terminal modification, a problem frequently faced in recombinant protein expression and purification (Ryan (2013) Curr Protoc Protein Sci Chapter 5:Unit 5 25). It also provides an explanation for the observed ligase activity of the sample as the Δ21 truncation removes the N-terminal modification and exposes the amino group of the active site serine at position 22. In agreement with the ˜200× decreased ligase activity compared to unmodified Adriase (see above), the A21 truncation accounts only for a small fraction of the sample. Consequently, evidence suggests that N-terminal modifications can be subject to proteolytic degradation but inactivate the enzyme as long as they persist and that an exposed serine/threonine residue is indeed required for catalytic activity.

### EXAMPLE 14: GENERAL APPLICABILITY OF ADRIASE AS A PROTEIN-PROTEIN LIGASE

[0458] To investigate, whether Adriase can act as a general ligase for any protein substrate bearing the Adriase ligation motif, further ligation experiments with other unrelated protein substrates were conducted.

[0459] Specifically, 0.9 μM M. mazei Adriase (SEQ ID NO: 380) were added to 3.7 μM Ub-(5)KDPGA(10) (SEQ ID NO: 524) and/or 3.7 μM PGA(10)-sdAb (single-domain antibody; SEQ ID NO: 663), PGA(10)-CyP (Cyclophilin; SEQ ID NO: 664) or PGA(10)-GST (Glutathione-S-Transferase; SEQ ID NO: 665) as indicated (FIG. 23). The reaction was conducted reaction buffer (50 mM acetic acid, 50 mM MES, 50 mM HEPES, 100 mM NaCl, 50 mM KCl, 5 mM TCEP, pH 7.0) at 37° C. and stopped either after the indicated time (FIG. 23, lanes 1-4) or after 10 min (lanes 5-10) by addition of 2% SDS, following SDS-PAGE analysis.

[0460] The resulting SDS gel (FIG. 23) shows that Adriase efficiently ligates all three protein pairs, suggesting that Adriase can generally ligate any two proteins bearing the Adriase ligation motif.

### EXAMPLE 15: ANALYSIS OF THE ADRIASE LIGATION MOTIF

[0461] To study which ligation motifs are processed most efficiently, a systematic analysis of sequence determinants N- and C-terminal of the MtrA-derived (X₁)KDGPA(X₂)/PGA(X₃) motif was conducted.

[0462] Specifically, in three independent experiments, 25 μM primary and 25 μM secondary substrates were incubated with 0.0025 molar equivalents of M. mazei Adriase (SEQ ID NO: 380) in reaction buffer (50 mM acetic acid, 50 mM MES, 50 mM HEPES, 100 mM NaCl, 50 mM KCl, 5 mM TCEP, pH 7.0) at 50° C. In a first set of experiments, different primary substrates—(0)KDPGA(10), (5)KDPGA(10), (10)KDPGA(10), (5)KDPGA(15), Ub-(5)KDPGA(10) and Ub-(5)KDPGA(15) (SEQ ID NO: 520, 524, 531-534; Table 8)—were combined with the same secondary substrate, PGA(15)-Ub (SEQ ID NO: 521); In a second set of experiments, different secondary substrates—PGA(5), PGA(10)-Ub, PGA(15)-Ub and PGA(20)-Ub (SEQ ID NO: 521, 525, 529-530)—were combined with the same primary substrate, Ub-(5)KDPGA(15) (SEQ ID NO: 520). Similarly, PGA(10) and PGA(15) (SEQ ID NO: 454 and 528) were combined with an analogous substrate, Ub-(5)KDPGA(15)-Strep (SEQ ID NO: 522). At various time points (0 s, 28 s, 55 s, 88 s, 126 s, 171 s, 225 s, 295 s, 393 s, 554 s, 1125 s, 1670s and 2250 s), an aliquot of the reaction was mixed with 2% SDS. Samples were then separated on 12% polyacrylamide gels (Thermo) and stained with Coomassie blue. The band intensities of educt and product bands were quantified using ImageJ v1.52a, assuming that all ubiquitin molecules bind the coomassie dye in a similar manner. The results were used to plot the time courses for each experiment. Using the above described formula

$$Ligated product = {\int }_{{t}_{-} s t a r t}^{{t}_{-} end} [ maximum rate ] * ( 1 - \frac{Product concentration at t}{Maximum product concentration} ) * dt ,$$

the data fit for each time course allowed the determination of the maximum rate parameter in each experiment.

[0463] The results (FIG. 24) show that 5 residues N-terminal of KDPGA and 10 residues C-terminal of KDPGA/PGA allow efficient ligations in most cases, but that sterically demanding protein-protein ligations are much faster with 15 residues C-terminal of PGA.

TABLE 8
Peptides used for ligation motif analysis
(synthesized by Genscript)

| Peptide | Sequence | SEQ ID NO |
|---|---|---|
| (0)KDPGA(10) | KDPGAFDADPLVVEI | 531 |
| (5)KDPGA(10) | RELASKDPGAFDADPLVVEI | 532 |
| (10)KDPGA(10) | ITSKVRELASKDPGAFDADPLVVEI | 533 |
| (5)KDPGA(15) | RELASKDPGAFDADPLVVEISEEGE | 534 |
| PGA(5) | PGAFDADP | 529 |
| PGA(10) | PGAFDADPLVVEI | 454 |
| PGA(15) | PGAFDADPLVVEISEEGE | 528 |

### EXAMPLE 16: COMPARISON WITH SORTASE

[0464] The most widely used enzyme ligase is Sortase A, which has proven a powerful and reliable tool in numerous remarkable applications. Sortase A has been extensively optimized and state of the art in many labs is currently the Sortase A pentamutant (SrtA5*), which has been reported to show up to 120× increased rates compared to the wild type enzyme (Chen (2011) loc. cit.). Analogous to Adriase, Sortase A ligates two sequences bearing the LPET-G motif and an N-terminal glycine, respectively, though additional linker sequences are usually introduced to avoid steric hindrances and to increase reactivity (Heck (2014) loc. cit.). In addition, Sortase also catalyzes the irreversible hydrolysis of substrates and products featuring this motif at a lower rate (K_{cat Ligation}/K_{cat Hydrolysis}≈3.3 (Frankel (2005) loc. cit.) and the maximum amount of product can therefore only be obtained by monitoring the ligation/hydrolysis ratio and by stopping the reaction at just the right time.

[0465] To evaluate the applicability of Adriase, its ligase efficiency was compared with that of SrtA and SrtA5*. Specifically, in three independent experiments, the time courses of a M. mazei Adriase (SEQ ID NO: 380) catalyzed ligation of Ub-(5)KDPGA(15) (SEQ ID NO: 520) and PGA(15)-Ub (SEQ ID NO 521) as well as the time courses of a SrtA5* (SEQ ID NO: 535) or SrtA (SEQ ID NO: 662) catalyzed ligation of Ub-GGSLPETGGGHHIIIIIH (SEQ ID NO: 536) and GGG-Ub (SEQ ID NO: 666) were recorded. The Adriase assays were conducted with 3.13 μM and 100 μM substrate concentration and 0.0025 molar equivalents Adriase (SEQ ID NO: 380) in reaction buffer (50 mM acetic acid, 50 mM MES, 50 mM HEPES, 100 mM NaCl, 50 mM KCl, 5 mM TCEP, pH 7.0) at 50° C. The SrtA5* and SrtA assays were conducted with 3.13 μM and 100 μM substrate concentration and either 1 or 0.1 molar equivalents SrtA5* or SrtA (SEQ ID NO: 535 and 662) in Sortase buffer (50 mM Tris-HCl pH 7.5, 150 mM NaCl, 10 mM CaCl₂)) at 37° C. At various time points (0 s, 28 s, 55 s, 88 s, 126 s, 171 s, 225 s, 295 s, 393 s, 554 s, 1125 s, 1670s and 2250 s), an aliquot of the reaction was mixed with 2% SDS. Samples were then separated on 12% polyacrylamide gels (Thermo) and stained with Coomassie blue. The band intensities of educt and product bands were quantified using ImageJ v1.52a, assuming that all ubiquitin molecules bind the coomassie dye in a similar manner. The results were used to plot the time courses for each experiment.

[0466] The results (FIG. 25) show that, at low substrate concentrations (3.13 μM each), SrtA and SrtA5* display only spurious ligase activity, even at an enzyme:substrate ratio of 1:1. By contrast, Adriase ligates ˜50% (on a molar basis) of the substrates in an analogous assay at an enzyme:substrate ratio of only 1:400. At high substrate ratios (100 μM), SrtA and SrtA5* show more favorable characteristics. Yet, even under those conditions, Adriase shows >4000× higher ligase activity than non-optimized SrtA and >40× increased ligase activity compared to optimized SrtA5*. Furthermore, we observed increased ligation yields in Adriase reactions (˜50% compared to ˜30%), which we attribute to the apparent absence hydrolysis side-reactions. These side-reactions are particularly pronounced in case of SrtA5*, likely due to its low affinity for the secondary (GGG-) substrate (K_{M LPETG}=170 μM; K_{M GGG}=4700 μM (Chen (2011) loc. cit.). These results are comparable with Sortase ligations of other protein substrates (Levary (2011) PLoS One 6:e18342; Li (2020) JBC 295:2664-2675; Heck (2014) loc. cit.) and demonstrate, why the secondary substrate is often added in 10× excess (Antos (2016) loc. cit.). Hence, Adriase is advantageous compared to Sortase enzymes, as it combines substantially higher substrate affinities, reaction rates and ligation yields without catalyzing detectable side reactions.

### EXAMPLE 17: ADRIASE CATALYZES SPECIFIC LIGATIONS IN COMPLEX SOLUTIONS

[0467] To test whether Adriase is also specific in more complex solutions, two independently expressed protein substrates were ligated within their respective cell lysate and subsequently purified the ligation products in a single step using a Ni-NTA column in series with a streptavidin column.

[0468] Specifically, Strep-Ub-(5)KDPGA(10)-His₆ (SEQ ID NO: 538) and PGA(15)-Ub (SEQ ID NO: 539) without affinity tag were recombinantly expressed in E. coli. Transformed cells carrying the respective plasmids (see Example 1) were grown in at 25° C. in 2 L lysogeny broth (LB) and protein expression was induced at an optical density of 0.4 at 600 nm with 500 μM isopropyl-β-D-thiogalactoside. After 16 h, cells were harvested and all subsequent steps conducted at 7° C., unless stated otherwise. The cell pellet of constructs was resuspended in buffer (50 mM acetic acid, 50 mM MES, 50 mM HEPES, 100 mM NaCl, 50 mM KCl, 10 mM Imidazole, 5 mM MgCl₂, 50 μg/ml DNAse (Applichem) and cOmplete protease inhibitor (Roche) pH 7.0), lysed by three french press passages at 16000 psi, and cleared from cell debris by ultracentrifugation at 100000 g for 45 min. The supernatant was then filtered using membrane filters (Millipore) with a pore size of 0.22 μm. For the ligation, equal volumes of each cell lysate were mixed with 0.09 g/l M. mazei Adriase-His₆ (SEQ ID NO: 380), which corresponds to a molar enzyme:substrate ratio of roughly 1:30. After incubation for 15 min at 37° C., the pH was adjusted to 8.0 and the mixture applied on a HisTrap FF Ni²⁺-NTA column in series with a HiTrap streptavidin column (GE). Following rigorous washing (20 mM Tris, 250 mM NaCl, pH 8), the reaction product was eluted with desthiobiotin (20 mM Tris, 250 mM NaCl, 2.5 mM desthiobiotin pH 8). In a second step, His₆-tagged educts were eluted with desthiobiotin and imidazole desthiobiotin (20 mM Tris, 250 mM NaCl, 2.5 mM desthiobiotin, 250 mM imidazole pH 8).

[0469] The results (FIG. 26) show that only one protein species, Strep-Ub-(5)KDPGA(10), could be eluted with desthiobiotin, indicating that no other proteins in the lysate reacted with the Strep-Ub-(5)KD-Adriase intermediate. In accordance with the nanomolar affinity interaction between Adriase and its conserved recognition motif (FIGS. 5 and 18), this observation suggests that Adriase ligations are highly specific and applicable even in complex solutions. Moreover, this experiment highlights the feasibility of Adriase-mediated ligations for the large-scale generation and single-step purification of a given ligation product in short time and with minimal amounts of enzyme.

[0470] An overview of potential applications is shown in FIG. 16.

The application's sequence listing, which the Patent Office published only in electronic form, follows.

SEQUENCE LISTING (667 sequences)

SEQ ID NO: 1 - protein, 95 aa, Artificial Sequence
  >OB_consensus
LEKAKEIQMASKIITEGEVGKVVNIDGNMLEVKLNKDVEALDTNWKLAKPGENVLMFIDDPGEVKIGDKVVIENENLCIKRNKSPLKCDVILCKL

SEQ ID NO: 2 - protein, 196 aa, Artificial Sequence
  >DUF2121_consensus
SLVIAYVGKKGAVIAGDKREILFRGDKEKREKLEEELYSGKIKTDEELLKRAEELGVKIKIRDDREKVRKRGDVLVGEVTEIGAETRRRRIYATKGAYAIVEIEGSEITKKSGGGSGIIVFGNKITKEIANKEIRKAWKKKGSLKDAVRIIELIMEEAARTPSVSKEYDLLQTTEKDLEETIEEDIKELGKYRLKM

SEQ ID NO: 3 - protein, 295 aa, Artificial Sequence
  >NTN+OB_consensus
SLIIAYVGKKGAVIAGDKREILFRGDKEKREKLEEELYSGKIKTDEELLKRAEELGVTLKISDDREKVRKRGGVLVGEVSEIGAGETRRRRIYATTGGYAIVEIEGSEITNKSGGGSGIIVFGNKITKEIANKEIKKYWKKKGSLKDAGRIIELIMEEAARTPSVSKEYDLLQTTKEKDLEETIEEDIKELEKYRLKELLKQAEEIQMASKIITEGEVGKVSNIKGNMLEVKLNKDVEALDTNWKLLAKPGEKVLMFIDEPGDVKIGDKVVIENENLCIKRNKSPLNCDIILCKS

SEQ ID NO: 4 - protein, 203 aa, Methanococcus voltae
  >WP_013180795.1 DUF2121
SVIIGYYGNNGSAIAGDKRNILFRGSEANREKLESLLYNGKLKNDKELKEKAEEYDVKVHITDSQDKIKKLDGCLMGEVKTISNQSKRKRMYLSKNNCALVEIIDDDMTKKEIKKGSGIIIFGNKHLKQLVQAELQKNVNIVKSGDILKIEKLFKDILSNIDTPSSSNDVDSYSNFKYENLEKVISQELSNLVDYRNGLKNQI

SEQ ID NO: 5 - protein, 204 aa, Methanococcus aeolicus
  >WP_011973890.1 DUF2121
SIIVGYYGANGAVVGGDKRNIIFRGNAEQREELEKLLYSGNIKTDEEFKKIADEYGIKVYIEDKQLKVREVNGVLVGEVKSIGTDSQRRRMYLSTGNCAIIDILNDTITKKSSNVGHGLILFGNRYLKEIVHNELKKDAPNFKNMPIEKVKNIIENAIKRCDGPTVSEEIILLHTKDKHNNFKELIKKDINDLKEYRNGLRQQM

SEQ ID NO: 6 - protein, 204 aa, Methanothermococcus thermolithotrophicus
  >WP_018153627.1 DUF2121
SVIIGYYGKNGAVIAGDRRNILFRGDPKKREELEKKLYSGELKSDEELIRAAKDLGINIHIDDEKIKVRKIEDVLVGEVSSIGAESKRRRMYITKGKCAIIDILNDTITNKSIREGSSIVVFGNKYIKNLVQQELVKYKNKILKMSILEIKNLFEEILKNCNNPTVSKKYDVFYTVNCSKNFEETIENDIKDLFNYRNELNKKM

SEQ ID NO: 7 - protein, 205 aa, Methanococcales archaeon HHB
  >GBF37010.1 DUF2121
SIVIGYYGNNGAVIGGDKRNIIFRGDPKKREELEKKLYSGKIKDEEELKKVAEELGVKVYIEDERVKVKKINNTLVGEVRSIGADSRRRRMYLTKGMCVIVDILNDDVIGKSVKRGNGVIIFGNKHLKEIARKELRKYMYDFTRMGIGEVKDVIEGVLKRCCRGPTSSKDFDILYIDEGEKDLEKVIEEDLEELRRYREELRQKM

SEQ ID NO: 8 - protein, 205 aa, Methanococcales archaeon HHB; identical to SEQ ID NO: 7
  >WP_131007839.1 DUF2121

SEQ ID NO: 9 - protein, 204 aa, Methanothermococcus okinawensis
  >WP_013866916.1 DUF2121
SIVIGYYGNNGAVVAGDRRNIMFRGNPEKRAELEKDLYCGKIKNEEELKNRAEELGVKIFIEDERTKVKKIGDVLVGEVKSIGADSKRRKMYLTKGNCAIVDILNDTITNKSIKNGSSIIIFGNKYLKDIVQKELKKYMNNFGKMDILDVKNTIENALKKCDGPTLSPELDILHTNKKVFNLEEIIEKDLNDLKEYRNDLKQKM

SEQ ID NO: 10 - protein, 205 aa, Methanotorris igneus
  >WP_013799607.1 DUF2121
SLIIGYYGRNGAVLGGDKRNIMFRGDIEKRKKLEEMLYNGEIKDDEELLKKAEEFGIKLHIEDNRKKVRKIGDDVLVGEVKSIGIDSERRRVYLTKGKCIIVDVFNDEIRNKWTKTGSGVVVFGNRYVKKIAEEEFRKAGYRLTMMSLEEIRDLIENIFKKCNTPSVSKGYDIIYTTKECKNLEEVVKKDLDALFEYRETLRKKM

SEQ ID NO: 11 - protein, 205 aa, Methanotorris formicicus
  >WP_007043881.1 DUF2121
SVIIGYYGKNGAVLGGDKRRIMFRGDVEKRKMLEKLLYNGEIKNDEELLKKAEELGIKLHIEDGKKKVRKIGNDVLVGEVKTIGIDSKRRRVYLTKGKCMIVDVFNDEIKNKLIKTGSGVVVFGNKYVKKIAEDEFKKIGHRLTMMSLEEIKDIIENIFKKYDTPSVSKEYIVVYTTKECKNLEEVVKKDLDELFEYRETLRKKM

SEQ ID NO: 12 - protein, 205 aa, Methanocaldococcus infernus
  >WP_013100627.1 DUF2121
SLILCYFGNNGAIILGDRREMFFRGNEEKRKELEELLYSGEIKSEEELRKKAEELGVKIIIEDKRRKVWKIKNVVVGEVRSLGLDAKRRRVYATKRKAKILEILNDQIIGEKNLEGFSIIIFSNKFIKEEINKYLKEYYRVLPMKRIDEVGEIFKEIYKKVSWHPTLSEEFDVEKTDKEEEDFEEVIEEDVKKLFEYREELKKKL

SEQ ID NO: 13 - protein, 205 aa, Methanocaldococcus villosus
  >WP_004589885.1 DUF2121
SLVICYYGNNGAVMAGDRRQMFFKGPEEKRKILEEKLYSGEIQNEEDLYKLADDLGVKVIIEDNREKVRKIGNTLVGEVRSIGLEAKRRRVYATKGKCMILEILGDVITDRMLKNGAGLIVFGNRYLKNKAEKILKNVAKDFPKMDIDEVGKVIKDVFERFKEHPTISREYDIYVTKNIDINFEKTVEEDINKLFKYREDIRKKM

SEQ ID NO: 14 - protein, 206 aa, Methanocaldococcus vulcanius
  >WP_015733029.1 DUF2121
TLVICYYGKNGAVIGGDRRQIFFRGNEEKRKLLEEKLYSGEIKTEEELYKLAEELGVKIIIEDDREKVRKISDTVVCGEVRSLGVDAKRRRVYATKGKCAIIDILNDTITKEIIKEGFGLVIFGNKFLKNRAEEELRNKAKLFPMMPIQQIESEIREIFEKLKWHPTVSKEYDIYSVNKYEKNFEEVIKKDIGDLFEYREKLRQQL

SEQ ID NO: 15 - protein, 206 aa, Methanocaldococcus fervens
  >WP_015791349.1 DUF2121
SLIICYYGKNGAVIGGDKRQIFFRGNEEKRKILEEKLYNGEIKSEEELYKLADELNIKIIIEDNREKVRKISDSVVVGEVRSLGIEAKRRRVYATKGKCAIVDILNDTVTNEVIKEGFGIVVLGNRFLKKKAEEELKSSAKLFPMMPLEQIENVIRDIFEKLNWNPTISKEYDIYSVDKYEKNFEEVVRKDIESLFKYRDELRKQL

SEQ ID NO: 16 - protein, 206 aa, Methanocaldococcus sp. FS40622
  >WP_012979926.1 DUF2121
SLIICYYGKNGAVIGGDRRQIFFRGEEQKRKILEEKLYSGEITSEDELYNLARELNIKIIIEDDREKVRKISDSVVVGEVRSLGIDARRRRVYATKGKCAIIDILNDTVTNQMIKEGFGVVVLGNRFLKKKAEEELKRTAKLFPMMPLQQIEDAIKEIFEKLKWHPTISKEYDIYSVNKYEKDFEEVIKKDIESLFKYREQLRKQL

SEQ ID NO: 17 - protein, 206 aa, Methanocaldococcus jannaschii
  >WP_010870052.1 DUF2121
SLIICYYGKNGAVIGGDRRQIFFRGSEENRKILEEKLYSGEIKSEEELYKLAEKLNIKIIIEDDREKVRKISDSVVCGEVRSLGIDAKRRRVYATKGKCAIVDILNDTVTNQTIKEGFGIVVLGNRFLKKKAEEELKRTAKLFPMMPIQQIEDAIKEIFEKLKWHPTVSKEYDIYSVNKYEKNFEEVIKKDIESLFKYREQLRKQL

SEQ ID NO: 18 - protein, 206 aa, Methanocaldococcus bathoardescens
  >WP_048201244.1 DUF2121
SLIICYYGKNGAVIGGDRRQIFFRGNEENRKILEEKLYSGEIKSEEELYKLAKELDIKIIIEDNREKVRKISDSVVVGEVRSLGIDAKRRRVYATKGKCAIVDILNDTVTNQTIKEGFGIVVLGNRFLKKSAEEELKRTAKLFPMMPLEQIEDTIREIFEKLKWNPTISKEYDIYSINKYEKNFEDVVKKDIESLFKYREELRKQL

SEQ ID NO: 19 - protein, 204 aa, Methanococcus vannielii
  >WP_012066013.1 DUF2121
SVIIGYYGKNGVVIAGDKRTILFNGEEKKREMLEELLYSGKIKNDDDLSEKSAEFSVKVHILDDQKKIKQLENTLIGEVRTIGKDSKRKKMYLSKDICVILDIENDNIVKKSVKTGTGIVVFGNKYVKKIVELELKKYLSEISKMDVLKIRTIFEKILVGIENPTLSKGYDFLYCQNAEKDIESIIKKDLNDLREYREELSIKM

SEQ ID NO: 20 - protein, 204 aa, Methanococcus maripaludis
  >WP_011869407.1 DUF2121
SVIIGYYGKNGAVIAGDSRNLLFKGIKSNREKLEELLYSGKIRTDEELMKKASEFDVNVYINDSEEKVRILGNLLCGEIKSIGKDSKRRRMYLSKEKCAVLDIENDQITNKSVKTGSGIVVFGNKYIKSLVESEIKKYIKDILKMSVKEIKNLFEKILEKTENATLSGKFEYYFVETYENNFEMAVEDDLNELFEYRKELSLKM

SEQ ID NO: 21 - protein, 204 aa, Methanococcus maripaludis
  >WP_012193694.1 DUF2121
SVIIGYYGKNGAVIAGDRRNLLFNGIESNRKKLEELLYSGKIRTDEELMKKASEFDVNVYINDSEEKVRSLGTLLCGEVKSIGKDSKRRRMYLSREKCAVIDIENDRITNKSVKTGSGIVVFGNKYIKNLVESEIKKYIKNILKMSAEEIKNLFVKILENTKNATLSGNFEYHFVETYENNFEKVIEDDLNELFDYRKELSIKM

SEQ ID NO: 22 - protein, 204 aa, Methanococcus maripaludis
  >WP_011977398.1 DUF2121
SVVIGYYGKNGAVIAGDKRNLLFNGIESNREKLEEIMYSGQLRTDEELLKKASEFDVKIHINDTREKVKKFGNVLSGEVLSIGRESKRRRMYLTKEKCVILDIENDQITNKSVKNGSGIVVFGNRYIKNLVESEIKKHVQKILKMSAKEISALFEKILKNIENATLSNEFEYYFVETYENNLEKVIENDLNDLFNYRKELSLKM

SEQ ID NO: 23 - protein, 204 aa, Methanococcus maripaludis
  >WP_104837987.1 DUF2121
SVVIGYYGKNGAVIAGDKRNLLFNGIESNREKLEEVLYSGEIKSDEELFKKASEFDVTVHINDTREKVKSLGNLLSGEVLSIGKDSKRRRMYLTKEKCAIIDIENDQITNKSVKTGSGIVVFGNRHIKHFVESEIKKHIQKLLKMNAREIRDLFEKILKKIENATLSDTFEYYFVEAGEPEFEKAVNDDLDDLFNYRHDLSIKM

SEQ ID NO: 24 - protein, 204 aa, Methanococcus maripaludis
  >WP_013998520.1 DUF2121
SVVIGYYGKNGAVIAGDKRNLLFNGIESNRAKLEKVLYSGEIKTDEELFKKASEFDVTVHINDTREKVKSLGNLLSGEVVSIGKDSKRRRMYLTKEKCAIIDIENDQITNKSVKTGSGIVVFGNRYIKHFVESEIKKHVQKLLKMSAREIRDLFEKILKNIENATLSDNFEYYVVEAGEPEFEKAVNKDLDDLFNYRHDLSIKM

SEQ ID NO: 25 - protein, 204 aa, Methanococcus maripaludis
  >WP_011169965.1 DUF2121
SVVIGYYGKNGAVIAGDKRNLLFNGIESNRAKLEEVLYSGEIKNDEELFKKASEFEVTVHINDTREKVKSLGNLLSGEVVSIGKDSKRRRMYLTKEKCAIIDIENDQITNKSVKTGSGIVVFGNRYVKHFVESEIKKHVQKLLKMSAREIRDLFEKILKNIENATLSDTFEYYVVEAGEPEFEKAVNKDLDDLFNYRHDLSIKM

SEQ ID NO: 26 - protein, 204 aa, Methanococcus maripaludis
  >WP_119720453.1 DUF2121
SVVIGYYGKNGAVIAGDKRNLLFNGIESNRAKLEEVLYSGEIKTDEELFKKASEFDVTVHINDTREKVKSLGNLLSGEVVSIGKDSKRRRMYLTKEKCAIIDIENDRITNKSVKTGSGIVVFGNRYIKHFVESEIKKHVQKLLKMSAREIRDLFEKILKNIENATLSDTFEYYVVETGEPEFEKAVNKDLDDLFNYRHDLSIKM

SEQ ID NO: 27 - protein, 204 aa, Methanococcus maripaludis KA1
  >BAP60138.1 DUF2121
SVVIGYYGKNGAVIAGDKRNLLFNGIESNRAKLEKVLYSGEIKTDEELFKKASEFDVTVHINDTREKVKSLGNLLSGEVVSIGKDSKRRRMYLTKEKCAIIDIENDRITNKSVKTGSGIVVFGNRYIKHFVESEIKKHVQKLLKMSAREIRDLFEKILKNIENATLSDTFEYYVVETGEPEFEKAVNKDLDDLFNYRHDLSIKM

SEQ ID NO: 28 - protein, 213 aa, Methanopyrus sp. KOL6
  >WP_088335494.1 DUF2121
TLVLAYAGTDGALVAGDHRILVARMDEEKMREVEEKLYSGEIRTEEELESFLKDLEVEGGYFEFHDDRKKVWKVNDEVVAGEVGVRSAKGVRRRRVYATPGAHAIIELEGEKVLSKNFGGPALIVEGPKVVKELVIEFVDSELGGKPDLESLRNALDDIFEYVSSNTVLVSSEYDAFEVKGRVDHLARIHLQKAIDEDIERLRKYRRRLVEEM

SEQ ID NO: 29 - protein, 213 aa, Methanopyrus kandleri AV19
  >AAM01502.1 DUF2121
TLVLAYAGTDGALVAGDRRTLVARMDEEKMRKVEEKLYSGEIRTEEELESFLKDLDVEDGYFEFHDDRKKVWKVNDEVVAGEVGVRSAKGVRRRRVYATPGAHAIVELEGEKVLSKNFGGPALIVEGPKVVKELVIEFVNSELGGKPDLESLRNALDDLFEYVSSGTILVSSEYDAYEVKGKADPLARARLQKAIDEDIERLREHRRRLAEEM

SEQ ID NO: 30 - protein, 210 aa, Methanothermus fervidus
  >WP_013413908.1 DUF2121
SLILAYVGKKGCVIAGDKRKIAYFGDKSSRKILEEKLYTGKIKTLDELFEEAKKLGVSINITDNAKKVREKGHVAIGEVGIKATHSAKRRRLYATTNCYEIIELEGSKIVKRKKGNSALIVFGNRITKKISNEILKKEFNPKMSLQEIANLFKKIIKKASELTPTINKSCDIVIKNPILNKEMAEKILEMSISEDIKNLRKWRKSLKDKM

SEQ ID NO: 31 - protein, 210 aa, Methanobrevibacter curvatus
  >WP_067092528.1 DUF2121
SLIIAYVGKKGCVMVADKRRISYFGDKEDIESLEDKLYSGDLENDEELKKTANLLNVSLKISDKESKIRSLESSLVAEVSTKSTHKAMRKRIYATTNAYQIIELEGSNISNLDKGDSSIIIFGNKITKSLANDFLSKEFKADVSLKYMGDIFTRILSKIHLKTPSIGNEFDVLVKTPKFSKEEAQKYLDDLVKVDIKLLVKFRDKLTQDL

SEQ ID NO: 32 - protein, 210 aa, Methanobrevibacter olleyae
  >WP_067146985.1 DUF2121
SLIIAYVGNKGCVMVGDKRRIAYFGSKEERELLEQEIYSGDISSDEDLYARAEELEISLKISDDACKVKSLENVAVGEVSSRGAMETKRKRIYGTTNGFQIVELTGSEIVNVKRGESSIIVFGNKITKSLANDMLKNKWKPSFSLKYMGEIFGQIIEDISTKTPSLGTKYDVVIQQNNLSKTKVQDYLDEVIERDINLLAKFRNKLKEDL

SEQ ID NO: 33 - protein, 210 aa, Methanobrevibacter ruminantium
  >WP_012956362.1 DUF2121
SLIIAYVGKKGCVMAADKRRIAYFGLKEQREILEQEIYSGEIHNDEELYARAEELDVNLKVTDNACKVKSIENVAIGEVSSRGTMETKRKRIYGTSNGFKIIELSGSHVLNSKRGVSSIIVFGNKVTKSLANKMIQERWKPSFSLKYMGEIFGEILKDIAEITPSVGKDYDVIIEKNNLAKSQVQDYIDEVAERDVKVLAKFRAQLREQL

SEQ ID NO: 34 - protein, 211 aa, Methanobrevibacter sp. AbM4
  >WP_016358763.1 DUF2121
SIIIAYIGRKGCVMASDKRRIAYFGDKDNREKLEEELYSGNIRNDEELYKEAAKLGIDLKISDDAKKIKSIGNAVMGEVSSKTTREVRRRRIYGTTNGYQIIELIGSELKNKETGSSGIIIFGNKIAKQMANSLIKQRWKSSISLKYTGDIFEEIIKEIAEKTPSVGKNVDVIIGKDSKLTKTTAQKYLDETETRDIKVLEKYRQKLAEDL

SEQ ID NO: 35 - protein, 211 aa, Methanobrevibacter boviskoreani
  >WP_040681637.1 DUF2121
SIIIAYIGRKGCVMASDKRRIAYFGDKDNREKLEEELYSGNIRNDEELYKEAAKLGIDLKISDDAKKIKSIGNAVMGEVSSKTTREVRRRRIYGTTNGYQIIELIGSELKNKETGSSGIIIFGNKIAKQMANSLIKQRWKSSISLKYTGDIFEEIIKEIAEKTPSVGKNIDVIIGKDSKLTKTTAQKYLDETETRDIKVLEKYRQKLAEDL

SEQ ID NO: 36 - protein, 211 aa, Methanobrevibacter wolinii
  >WP_042707893.1 DUF2121
SVIIAYIGKKGCVMASDKRRIAYFGDKDEREKLEEDLYTGKIRNDEELYNEAKKRQITLKISDDVNKIKKIENALMGEVSTKTTMEIRRKRIYGTTNGYQIVELLGSETQNKERGSSGIIIFGNKIAKSMANSLIKERWKSSLSLKYIGDIFEEVIKEIASKTPSVGKNVDVLYSKDNTLNKTSAQEYLDKTEERDNKLLEKYRQKLTEDL

SEQ ID NO: 37 - protein, 211 aa, Methanobrevibacter sp. 87.7
  >WP_088539534.1 DUF2121
SVIIAYIGKKGCVMASDKRRIAYFGDKEEREKLEEDLYSGKIRNDEELYNEAAKRQITLKISDDVNKIKKIETVLMGEVSTKTTMEIRRKRIYGTSNGYQIVELLGSEVQNKERGNSGIIIFGNKIAKSIANSLIKERWKSNLSLKYIGDIFEDIIKEIASKTPSVGKNVEVLYTKNNNLNKVTAQEYLDKTEEIDNKLLEKYRQKLSEEL

SEQ ID NO: 38 - protein, 210 aa, Methanobrevibacter filiformis
  >WP_066972212.1 DUF2121
SLIIAYVGKKGCVIASDKRKIAYFGDKENIDKLEKELYNGNIKGDDDLYDTASKLDVSLKISEDGIKLRSFDKINVGEVSSKSTTETNRKRIYGTTNGYQIVELSGSKIVHTEKGNNALIIFGNKRTKTLANDLISKKWKSNFSLKYMGDIFLRILEEISAKTPSIGKAYDLNIINHKFTKEEANEYLDYFIEKDIQVLGKFRNQLKSEL

SEQ ID NO: 39 - protein, 210 aa, Methanobrevibacter smithii
  >WP_019266968.1 DUF2121
SLIIAYIGKKGCVMASDKRRIGYFGNKEQLNALESELYSGKIKNDDEFKKKADEYGIAIKLTEDATKITTVGNCVRGEVTTKKAFETYRKRIYGTTMGYQIVELSGSETVSREAGEKAIIVFGNKFAKQEAEKLINKKWKPSLSLKYMGDIFEEILTEISRKTPTIGNEFDVLIKQPKFNKSEAQRHLNVSIDKDIKVLSKFRQKLQEDL

SEQ ID NO: 40 - protein, 210 aa, Methanobrevibacter smithii
  >WP_019262821.1 DUF2121
SLIIAYIGKKGCVMASDKRRIGYFGNKEQLNALESELYSGKIKTDEEFKKKADEYGISIKLTEDATKITTVGNCVRGEVTTKKVFETYRKRIYGTTMGYQIVELSGSETVSREAGEKAIIVFGNKFAKQEAEKLINKKWKPSLSLKYMGDIFEEILTEISRKTPTIGNTFDVLIKQPKFNKSEAQRHLNVSIDKDIKVLSKFRQKLQEDL

SEQ ID NO: 41 - protein, 210 aa, Methanobrevibacter; identical to SEQ ID NO: 40
  >WP_004035387.1 DUF2121

SEQ ID NO: 42 - protein, 210 aa, Methanobrevibacter smithii
  >WP_004033346.1 DUF2121
SLIIAYIGKKGCVMVSDKRRIGYFGNKEQLNALESELYSGKIKTDEEFKKKADEYGISIKLTEDATKITTVGNCVRGEVTTKKVFETYRKRIYGTTMGYQIVELSGSETVSREAGEKAIIVFGNKFAKQEAEKLINKKWKPSLSLKYMGDIFEEILTEISRKTPTIGNTFDVLIKQPKFNKSEAQRHLNVSIDKDIKVLSKFRQKLQEDL

SEQ ID NO: 43 - protein, 210 aa, Methanobrevibacter sp. NOE
  >RBQ22740.1 DUF2121
SLIIAYVGKKGCVMASDKRRIAYFGEKDNREELEEELYSGSIANDDDLKKRSAELDITLKISDDANKIRYIEDVIVGEVSSRSTHETRRKRIYGTSNGYQLIEMLGSEITHSEKGESAIILFGNKVSKSLANDLISKKWKPRLSLKYMGEIFEDVLSEVSSKTPSLGKKYDVMIVQPKFNEKKAQSYLDETIKRDVQLLGKWREKLKNDL

SEQ ID NO: 44 - protein, 210 aa, Methanobrevibacter arboriphilus
  >WP_042704220.1 DUF2121
SLIIAYVGKKGCVMASDKRRIAYFGDKENREKLEEEIYSGAIKNDEDLKKRSDELDITLKISDDANKIRYIENVIVGEVSSRTTFETRRKRIYGTTYGYQIIEMLGSDITHSEKGENAIILFGNKISKAMANDLISKKWKSSFSLKYMGEIFESVLEEVASKTPSLGKKCDVMIVHPELDKKSSQKYLDETIKRDVQLLGKWREKLKNDL

SEQ ID NO: 45 - protein, 210 aa, Methanobrevibacter arboriphilus
  >WP_080459963.1 DUF2121
SLIIAYVGKKGCVMASDKRRIAYFGDKENREKLEEEIYSGSIKNDEDLKKRSDELNITLKISDDANKIRYIENVIVGEVSSRTTFETRRKRIYGTTYGYQIIEMLGSDITHSEKGENAIILFGNKISKAMANDLISKKWKSSFSLKYMGEIFESVLEEVASKTPSLGKKCDVMIVHPELDKKSSQEYLDETIRRDVQLLGKWREKLKSDL

SEQ ID NO: 46 - protein, 210 aa, Methanobrevibacter woesei
  >WP_116669733.1 DUF2121
SLIIAYVGKKGCVMASDKRKIAYFGNKENLEALESELYNGEIATDEELYKRAKDFDISIKISDDGNKIDTVGNTVMGEVASKGAFETKRRRIYGTTNGYQIIEIIGSEIVSRSAGEKAIIIFGNNFAKKEAEALISKKWKSTLSLKYMGDIFKEIINEVSQKTPTLGDKFDVLIQQPKFTADEAQKYLNETIDQDVKVLAKIRQKLQEDL

SEQ ID NO: 47 - protein, 208 aa, Methanobrevibacter millerae
  >WP_058739601.1 DUF2121
SLIIAYVGKKGCVMASDKRRIAYFGNNRQALEDELYDGSITTDEELYQRSKELDVPIKISDDADKIRVVGNTVRGEVSTKGTHETKRKRIYGTTNGYQIVELIGSETKSRQAGEKGIILFGNDFAKKQAETLIQRRWKASHSLRLMGDIFEEILSDIAQKTPTIGKEFDVLIQQPKFTASEAQKHLNITIDADIKVLTKYRQQLTEEM

SEQ ID NO: 48 - protein, 210 aa, Methanobrevibacter oralis
  >WP_042694031.1 DUF2121
SLIIAYIGKKGCVMASDKRKIGYFGNKENLEILENELYNAVIRDDDEFLKRAEELGISIKITDDANKISIVENTIRGEVSTKGTFETKRKRIYGTTNGYQIVELLGSEVSSRQAGKSGIIIFGNKFAKQKAETLINRYWKSSQSLKYMGEIFGNILEEISKKTPSIGSQFDILVKSPNFDEMKAQKHLDVTIDHDIKVLTKFRQKLTEEL

SEQ ID NO: 49 - protein, 210 aa, Methanobrevibacter
  >WP_069573863.1 DUF2121
SLIIAYIGKKGCVMAADKRRIGYFGDKKNLDLLEEELYEGSIGNDEEFLARASELGISIKITDDANKLKTVGNCIRGEVSTKGTLETKRRRIYGTTNGYQIIELLGSDTKSRNAGENGIVIFGNNFAKQLAHNLISKKLKGSKSLRYMGEVFEDILKEVSSKTPTVGKNIDVLMQQPDFNKTEAQKHLNLTIDHDIKVLTKFRQELTEQI

SEQ ID NO: 50 - protein, 210 aa, Methanobrevibacter thaueri
  >WP_116591264.1 DUF2121
SLIIAYVGKKGCVMASDKRKIGYFGDKENLKKLEDELYSGKITADEDFLKRAKELGISIKITDDASKLKIIGNTIRGEVSTKGTFETRRRRIYGTTSGYQIIELLGSDTQSRKAGKNGVIIFGNDYAKRMAETFIKREWKSSQSLRYIGEIFQGIIEDVASKTPTVGKNVDVMIQHPEFNEREAQKHLDITIDHDIKVLTKFRQELTEQI

SEQ ID NO: 51 - protein, 210 aa, Methanobrevibacter sp. YE315
  >WP_067043438.1 DUF2121
SLIIAYIGKKGCVMASDKRKIGYFGDKQNLKTLEEELYSGAIDNDEDFLNRASELGISIKITDDANKLKVVGNTIRGEVSTKGTFETRRRRIYGTTNGYQIIELLGSETESRKAGEKGIVIFGNVYAKQLAEPLIKRKVKASQSLRYMGEVFESILAEVASKTPTVGDKFDVLMQQPVFSVSEAQKHLNITIDNDIKVLTKFRQELTEQL

SEQ ID NO: 52 - protein, 210 aa, Methanobacterium sp. SMA27
  >WP_048190775.1 DUF2121
SLIITYIGSKGCVMAGDKRRIGFFGPEGPRENLEEKLYSGSINTKEELLKKADELGINIKISDDADKIHEIGDVVVGEVRSKTVYETKRKRIYATTGAYNIIELLGSDLKTVKSGGSSIIVFGNKYTKELAEKTIKRYWKSKLNLVTIRKIFESVMEEVAIETPTVSPEYDVMMKYPSIDTKEAKELLRVTILQDVKDLEEYRTQLKENL

SEQ ID NO: 53 - protein, 210 aa, Methanobacterium lacus
  >WP_013644693.1 DUF2121
SLIVTYIGSKGCIMAGDKRRIGFYGSPEARETLEDELYAGKIKTEEDLIKKAEEQGINLKISDDTTKIREMDNVLVGEVISRATHETKRKRIYAISGAYSMVELTGSNIDTVKSGGRSIIVYGNKYTQELAEKTIKKYWKPKMKFVDVERIMELVMSEVSENTPSVSKSFDLMIKYNSMDQKLAKEVIRTTVLEDVKNLEAFRNQLREEN

SEQ ID NO: 54 - protein, 210 aa, Methanobacterium sp. PtaB.Bin024
  >OPX57417.1 DUF2121
SLIITYIGSKGCVMAGDKRSIGFLGDKNQREILEEELYSGKIKTKDQLTKRAHQLDINLKITDESEKVRKLDKVLVGEVKIRATHETRRKRIYATTNGYHQVELVGSEIKNVKSGKSSIVIFGNKLTKEITGKRLKKHWKSKISLNEVGEIFQKVMEDVAQVTPSVSPQYDLSIIHPQMDHKQAMELLRTTIISDVKELEKWREQLREDM

SEQ ID NO: 55 - protein, 210 aa, Methanobacteriales archaeon HGW Methanobacteriales2
  >PKL73782.1 DUF2121
SLIMTYIGSKGCVMAADKRSIGFLGDKNQRELLEEDLYSGKIDSDEKLLKRAKELDINLKISDQGEKIRNLGKVLVGEVKIRATHETKRKRIYATTNGYHQVELTGSEIQNVKSGQSSIVIFGNKITKEIAGKSLKKHFKSKISLNEVGKIFQKVMEDVAEATPSVSSEHDIFIIHPQMDHKQAMELLRTTIISDVKELEKWRNKLKEDM

SEQ ID NO: 56 - protein, 210 aa, Methanobacterium
  >WP_100906514.1 DUF2121
SLIMTYIGSKGCVMAADKRSIGFLGDKNQRELLEEDLYSGKIDSDEKLLKRARELDINLKISDQGEKIRNLGKVLVGEVKIRATHETKRKRIYTTTNGYHQVELTGSEIQNVKSGQSSIVIFGNKITKEIAGKSLKKHFKSKISLNEVGKIFQKVMEDVAEATPSVSSEHDIFIIHPQMDHKQAMELLRTTIISDVKELEKWRNKLKEDM

SEQ ID NO: 57 - protein, 210 aa, Methanobacterium sp. MB1
  >WP_039376705.1 DUF2121
SLIITYVGSKGCVMAGDKRSIGFLGDKEQREVLEEEMYSGKIKTTEELLQRAEQLDINLKITDDVEKVRKIGDVLVGEVKLRTTTETKRKRIYGTSGGYHEVELSGSQIKNAKSGQSSIVVFGNKFTKEIANKHLQKYWKSQTSIKEIAKIFQRIMEDVAQSTPSVSPQFDIYTVHPQLNHKQAMEILRTTIVKDVKELEKWREELKTQM

SEQ ID NO: 58 - protein, 210 aa, Methanobacterium sp. MB1; identical to SEQ ID NO: 57
  >CDG65302.1 DUF2121

SEQ ID NO: 59 - protein, 210 aa, Methanobacterium formicicum
  >WP_048073463.1 DUF2121
SLIITYVGSKGCVMAGDKRSIGFLGDKEQREVLEEEMYRGKIKTTEELLQRAGQLDINLKITDSVEKVRNLGDVLVGEVKLRTTTETRRKRIYGTSSGYHQVELSGSEIKNVKSGQSSIVVFGNKLTKEITNKHLQKYWKSQTSLNEVSKIFQRIMEDVAQSTPSVSSQFDIYMVHPRLDHKQAMELLRTTIIEDVKELEKWREELKTQM

SEQ ID NO: 60 - protein, 210 aa, Methanobacterium formicicum; identical to SEQ ID NO: 59
  >CEA14429.1 DUF2121

SEQ ID NO: 61 - protein, 210 aa, Methanobacterium formicicum
  >WP_048086016.1 DUF2121
SLIITYVGSKGCVMAGDKRSIGFLGDREQREVLEEEMYSGKIKTTEELLQRASQLDINLKITDSVEKVRNLGDVLVGEVKLRTTTETRRKRIYGTSSGYHQVELSGSEIKNVKSGQSSIVVFGNKLTKEIANKHLQKYWKSQTSLNEVSKIFQRIMEDVAQSTPSVSSQFDIYMVHPRLDHKQAMELLRTTIIKDVKELEKWREELKTQM

SEQ ID NO: 62 - protein, 210 aa, Methanobacterium formicicum; identical to SEQ ID NO: 61
  >AIS32222.1 DUF2121

SEQ ID NO: 63 - protein, 210 aa, Methanobacterium formicicum
  >WP_060537561.1 DUF2121
SLIITYVGSKGCVMAGDKRSIGFLGDREQREVLEEEMYSGKIKTTEELLQRASQLDINLKITDSVEKVRNLGDVLVGEVKLRTTTETRRKRIYGTSSGYHQVELSGSEIKNVKSGQSSIVVFGNKLTKEIANKHLQKYWKSQTSLNEVSKIFQRIMEDVAQSTPSVSSQFDIYMVHPRLDHKQAMELLRTTIIEDVKELEKWREELKTQM

SEQ ID NO: 64 - protein, 210 aa, Methanobacterium formicicum; identical to SEQ ID NO: 63
  >CEL24543.1 DUF2121

SEQ ID NO: 65 - protein, 210 aa, Methanobacterium sp. BAmetb5; identical to SEQ ID NO: 63
  >AXV39335.1 DUF2121

SEQ ID NO: 66 - protein, 210 aa, Methanobacterium sp. Maddingley MBC34
  >EKQ53249.1 DUF2121
SLIITYVGKKGCVMAGDKRSIGFLGDRKQRELLEEELYAGKIKTTEDLHKRAEQLDINLKITDNVEKVRNLGEVLVGEVKLRTTLETRRKRIYGTSSGYHQVELTGSEIRKVQSGQSSIVVFGNKITKEIANKHLKKYWKSKTSLDEVGKIFRRIMEDVAQATPSVSQQYDIFIIHPQLNHKQAMELLRTTIVGDVKELEKWREKLKQEM

SEQ ID NO: 67 - protein, 210 aa, Methanobacterium formicicum
  >WP_004031535.1 DUF2121
SLIITYVGSKGCVMAGDKRSIGFLGDKEQRELLEEEMYTGKIKTTEELHKRAKELEINLKITDNVEKVRNLGEVLVGEVKLRTTLETRRKRIYGTSSGYHQVELTGSEIKNVKSGQSSIVIFGNKITKEIANKHLKKHWKSKTSLNEVGKIFRNIMEDVAQLTPTVSSQYDIFTVHPQLDHKQAMELLRTTMIADVKQLQKWREDLKQEM

SEQ ID NO: 68 - protein, 210 aa, Methanobacterium sp. PtaU1.Bin097
  >OPY22699.1 DUF2121
SLIICYTGSNGSVIIGDKRRIGFFGNEKKRELLEEEFYSGSIKTQEALLKRAEELGITLKITDDAEKVREIGDVITGEVKTTTPFETKRKRIYATTGSYSLVELSGSTIKNMEGGTTSIVVFGNKYTKEIANKAIQDNWKKKVSLKDVGEIFEKAMDEVSRQTPSVSPNYDLIIKHPSLNKKQARELLRTTILQDVKELEKWREELKEQM

SEQ ID NO: 69 - protein, 210 aa, Methanobacterium sp.
  >TMS41273.1 DUF2121
SLIICYTGSNGSVIIGDKRRIGFLGNEKKRKLLEEELYSLSIKSQDELLKRAAELEITLKISDDAEKVRELGDVVVGEVKNTTPFETKRKRIYATTGSYNLVELTGSSIEKMDGGTTSIVVFGNKSTKKIANQVIEENWKKKLSLKDVAGIFKKAMEEVSRQTPSVSQDYDIIVKNPELNKNQAREILRTTIIQDVKDLEKWRSQLKEQM

SEQ ID NO: 70 - protein, 210 aa, Methanobacterium
  >WP_069583131.1 DUF2121
SLIMSYIGSNGCVMAGDKRRIGFFGDKEKREKLEEYLYSGAIQTDEELVKVAKEQEVTLKISDDARKIRSIADVVVGEVRFKTPFETKRKRIYGTTNGYIITELSGSDIKKVENGASSIVVFGNKVTKQMANEIIKKHWKSKASLENVESVFKKVMDEISGKTPSVSKDYDIIIKHSGMDKREAQKHLREILIKDVKELQKWREGLRQQL

SEQ ID NO: 71 - protein, 210 aa, Methanobacterium
  >WP_048080675.1 DUF2121
SLIMSYIGSNGCVMAGDKRRIGFFGDKEKREKLEEYLYSGAIQTDEELVKVAKEQEVTLKISDDARKIRSIDDVVVGEVRFKTPFETKRKRIYGTTNGYIITELSGSDIKKIENGASSIVVFGNKVTKQMANEIIKKHWKSKASLENVESVFKRVMDEISTKTPSVSKEYDIITKHSGLDKKEAQKHLREILIKDVKELQKWREGLRQQL

SEQ ID NO: 72 - protein, 210 aa, Methanobacterium sp. BRmetb2
  >AXV36996.1 DUF2121
SLIMTYIGSHGCVMIGDKRRIAFFGDKELIQKLEEELYSGKIKNDEELLERSKSLDVTIKVVDDAKKVRSLGDVVVGEVRFKTTFETRRKRIYATTNGYDIVELLGSKIDKIQKGESSIIVFGNKMTKKIANDTIRENWKPKTNLKDIGELFKVIMEEIALLTPSISKDYDFFVKSKNMNNNEAQKLLRETIVRDVKLLEKWRNKLKDDL

SEQ ID NO: 73 - protein, 210 aa, Methanothermobacter sp. MT2
  >BAW31310.1 DUF2121
SLIITYVSSKGCVIVGDKRKIAYFGDRENRKKLEKELYEGKIKNEKELRKRAEELGITLNIRDDAKKVRSIGDVVIGEVSLKTPFEAKRRRIYATTNAYQIVELVGSNITKLEKGESSIIIFGNKITKELTGKLLKKRWKKKTNLKEVSKLLEEVLEEVAKKTPTISQEHDKFIKTPRLDKRKAHKLLRETIVRDVKVLQKWRATLKMEL

SEQ ID NO: 74 - protein, 210 aa, Methanothermobacter tenebrarum
  >WP_112094313.1 DUF2121
SLIITYTSSKGCVMIGDKRKIAYLGSPQKRRELERELYNGDIKTEEELRDRAEEFGIRLNIRDDARKVRSIGDVVVGEVSLKTPFEAKRRRIYATTGAYQIIELIGSNITKFEKGESSIVIFGNKITKKLASSLLKKYWKKKTSLKEVSKLLAKIVEEVAAKTPTISPEYDLYIKTPRLDKRKAHRILRETILRDVKTLQKWRAKLQKEL

SEQ ID NO: 75 - protein, 210 aa, Methanobacteriaceae archaeon 41_258
  >KUK01501.1 DUF2121
SLIITYISSKGCVIIGDKRKIAYLGSAQNRRELERELYNGNIKTEEELRSRAEQLGITLNITDDAKKVRSIGDVVVGEVSLKTPFEAKRRRIYATTGAYQIIELIGSNITKFEKGESSIVIFGNKITKKLASKLLKKHWKKKTSLEGISKLLKKILEDVATKTPTISREYDMYIKTPRLDKRKAHKLLRETILRDVKTLQKWRAKLQKEL

SEQ ID NO: 76 - protein, 210 aa, Methanobacterium paludis
  >WP_013825588.1 DUF2121
SLIITYIGSKGCVMIADKRRIGFFGEEKTREKLEEELYSGAIKTDEELLKKASSLGITLKITDDAEKIREIGDIVVGEVRFKTPFETKRKRIYGTTGAYNVVELLGSEIKRIKTGESSIVVFGNKVTKEIANKYIQNHWKKKTNLKDIGEIFKAAMEEVAAKTPSVSQKYDLFIKHADIDKKEAKELLRTTIITDVKDLKKWREDLTDEM

SEQ ID NO: 77 - protein, 210 aa, Methanobacterium congolense
  >WP_071906792.1 DUF2121
SLIITYVGSKGCVMAGDKRRIGFFGDEANREKLEEKLYSGEIRTDEELLKRASELEITLKITDDAEKVREIDDVAVGEVRFKTPFKTKRKRIYGTTGAYNIVELLGSDIKTIKGGESSIVVFGNKMTKEIANKTIKDNWKNKTSLQDIAKLFSKVMEDVARQTPSVSQEHDVIIKHPSMEYKEAKELLRTTIIQDVKDLTEWRNSLKEEL

SEQ ID NO: 78 - protein, 210 aa, Methanobacterium sp.
  >RJS49378.1 DUF2121
SLIITYIGAQGCVMAGDKRRIAFFGDKSNREILEEELYSGKIENESQLKKRASELEITLKITDDAVKLRSLGKVVVGEVSSKSSFETKRRRIYATTNGFQIIELTGSNITKMDKGESSIIVFGNKFTKKTASKILKKYWKSKTTLKEIETIFQKVLHEVSEKTPSVGSSCDLFIKTPALDKKESQKILRETVVRDVKLLQKWRQKLKKDL

SEQ ID NO: 79 - protein, 210 aa, Methanobacteriales archaeon HGW Methanobacteriales1
  >PKL67848.1 DUF2121
SLIMSYIGSKGCVISADKRRIAYFGDKSNREQLEEELYAGAIINDKELQARALDLGITLKISDDVCKVRSVGEVVVGEVSVKSPFETKRRRIYGTTNGYQIVELSGSDIAKMEKGEISIVVFGNKKTKEVANEIIKKRWENKTSLKGIADIFKEVMVEVAKVSPSISSENDIFIKHPKLDKREAQKLLRETILRDVKLLKKWREKLQNDL

SEQ ID NO: 80 - protein, 210 aa, Methanothermobacter marburgensis
  >WP_013295962.1 DUF2121
SLIITYISTRGCVIAGDKRRIAYFGDKSKREKLEEELYSGKIKSDDELHRRASELGVSIKVTDDTAKVRSLGDVVVGEISQKTPFETKRRRIYATTGAYQIIDLTGSRITSMEKGETAIIVFGNKVAKELTNRFLKKRWKTKTTLKEVENLFRELMDYVSSRTPSVGSKYDIFMKSPSLDKRSAHKLLSDTIVRDVRLLQKWRAKLKQEM

SEQ ID NO: 81 - protein, 210 aa, Methanothermobacter wolfeii
  >WP_074359097.1 DUF2121
SLIVTYISTRGCVIIGDKRRIAYFGDRSAREKLEEELYSGRIKSDEELQRRASELGLNIKVTDDACKVRSIGDVVVGEISQKTPFETKRRRIYATTGAYQIIELTGSRITSMEKGDTAIIVFGNRIAKEITNGFLKKRWKTRTTLKEVSELLTELMEHVSSRTPSVGSKYDLFMKSPALDKKSAHRILSETIVRDVKVLQKWRAKLRQEM

SEQ ID NO: 82 - protein, 210 aa, Methanothermobacter sp. CaT2
  >WP_048175474.1 DUF2121
SLIITYISSKGCVIAGDKRRIAYFGDKSSREVLEEELYTGKIKSDEELQRRASELGVNIKVTDDTCKVRSLGDVVVGEISQKTPFETRRRRIYATTGAYQIIELTGSKITSMEKGDTAIIVFGNKIAKEITNRFLKKRWKTKTSLKDVADLFRELMDHVSSQTPSVGSEYDLFIKSPSLDKKSAHKLLSDTIVRDVRLLQKWRAKLKQEM

SEQ ID NO: 83 - protein, 210 aa, Methanothermobacter thermautotrophicus
  >WP_010876390.1 DUF2121
SLIITYISSKGCVIAGDKRRIAYFGDKSSREVLEEELYTGKIKSDEELQRRASELGVNIKVTDDTCKVRSLGDVVVGEISQKTPFETRRRRIYATTGAYQIIELTGSRITSMEKGDTAIIVFGNKIAKEITNRFLKKRWKTKTSLKDVADLFRELMDHVSSQTPSVGSEYDLFIKSPSLDKKSAHRLLSDTIVRDVRLLQKWRAKLKQEM

SEQ ID NO: 84 - protein, 210 aa, Methanothermobacter sp. EMTCatA1; identical to SEQ ID NO: 82
  >BAZ98793.1 DUF2121

SEQ ID NO: 85 - protein, 210 aa, Methanothermobacter defluvii; identical to SEQ ID NO: 83
  >WP_115892198.1 DUF2121

SEQ ID NO: 86 - protein, 197 aa, Methanothrix concilii
  >WP_013718183.1 Methanothrix concilii Adriase
SLVVALTKSKEAVIGGDRRSITFLGSWPELEEELYCGRISDDEALLAKAMEIGAILQVTDGRDKVWRRGDLLVGEVTEITPQLERRRRIYLAPGSQLQVDITGKEVRIRDRGAMGCIIYGNRFTQQIAVSIVVQADGRVDEALIRKIFQEAAERTASVSQEHVILKSERMLSNPQKALEKALEEDCQENGWKLCDPL

SEQ ID NO: 87 - protein, 209 aa, Methanosaeta sp. ASO1
  >OYV11463.1 Methanosaeta sp. ASO1 Adriase
SLVIALAVSRQALIAADRRAIVFLGSCRKLEEELYSGQIKSDLELEARADALGAALHISDSREKIWRRGDVLVGEVTELSALLQRRRRIYLAPGASLQVEIRSGEDDGMEPGTVGGEARITAWGGVGCTIFGNRFTQKLAAEEIALAGAKVDRSLIERIFQKAGERTASVSRQHTILSSSLIKADARADLLAALQEDCKERGWRLCGPQ

SEQ ID NO: 88 - protein, 209 aa, Methanosaeta sp. ASM2
  >OYV11309.1 Methanosaeta sp. ASM2 Adriase
SLVIALAVSRQALIAADRRAIVFLGSCRKLEEELYSGQIKSDLELEARADALGAALHISDSREKIWKRGDVLVGEVTELSALLQRRRRIYLAPGASLQVEIRSGEDDGLEPGTVGGEARITAWGGVGCTIFGNRFTQKLAAEEIAIAGAKVDRSLIESIFQKAGERTASVSRQHTILSSSLIKADARADLLAALQEDCKESGWRLCGPQ

SEQ ID NO: 89 - protein, 209 aa, Methanosaeta sp. NSM2
  >OYV11827.1 Methanosaeta sp. NSM2 Adriase
SLVIALAVSRQALIAADRRAIVFLGSCRKLEEELYSGQIKSDLELEARADALGAALHISDSREKIWKRGDVLVGEVTELSALLQRRRRIYLAPGASLQVEIRSGEDDGLEPGTVGGEARITAWGGVGCTIFGNRFTQKLAAEEIAIAGAKVDRSLIERIFQKAGERTASVSRQHTILSSSLIKADARADLLAALQEDCKESGWRLCGPQ

SEQ ID NO: 90 - protein, 200 aa, Methanothrix sp.
  >RQW79829.1 Methanothrix sp. Adriase
SLVVALAGSREAVIGGDRRSISFLGSCAKLEEELYSGQIKNDEELLARAREHEATLQVSDGREKVWKTGEVLVGEVTEISERLQRRRRIYLVPGAHLVVDITGSEAKISSTGKVGCVVFGNRITQRLAAEGAAKAKGRLNEAVIESILVDVADKTPSVSREHSVLRTDARPSNPDAALMGALQADCRKNGWRLCGPCAPQ

SEQ ID NO: 91 - protein, 225 aa, Methanosaeta sp. PtaU1.Bin112
  >OPY53627.1 Methanosaeta sp. PtaU1.Bin112 Adriase
SLVIALAASREAVIGADRRAITFLGSCPRLEEELYSGQIKDDQQLLDRAGELGAVLQITSSKEKVWRRGDLLVGEVTEISALLSRRRRIYLTPGASLQVDITSDGLEELADAGACKEAKKEAPDRASDKAHGEARIRSWNGVGCTVFGNLFTQKLAYDEVGRAGGRVNEPLVKSILAKAGERTASVSRESTVLRSDIKQPDPKAALLRALEADCKENGWRLCAPQ

SEQ ID NO: 92 - protein, 191 aa, Methanothrix thermoacetophila PT
  >ABK15022.1 Methanothrix thermoacetophila PT Adriase
SLVIAFSGREAVIAGDRRSIAFAGDCRLLEEELYSGRIHDDVELLRRAGELSATIYISDGREKVWRDGDVLVGEVTEVSASSSKRRRVYVTSGAYLIVDVVDGNARISGRGGASLIILGNRHTRDAAGKALQGLGKISADAIARVMDEVSAGTATMSREHTLLKITAHHKDPASILMQTFSRDCERMGWRL

SEQ ID NO: 93 - protein, 199 aa, Methanosaeta sp. SDB
  >KQC14876.1 Methanosaeta sp. SDB Adriase
SLVVGFAGKKRAILGGDRRSIVFFGGAEALEEELYDGKIRTDEELKKRAEELGSVIQIANGREKVWKRNDGKVLVGEVTELSASSQRRRRVYLTPGGYILVEISGKRAEVSKKGKSTLIILGNKFTRELAYRRLGSAGKPPEISSMKALFEEARRATATISPDYTLLSSDEICSNPEAVLLQALREDCEERGWELFGLA

SEQ ID NO: 94 - protein, 196 aa, Methanosaeta sp. PtaB.Bin087
  >OPX80929.1 Methanosaeta sp. PtaB.Bin087 Adriase
SLVVGFAGKKRAILAGDKRRIAFFGRAERLEEELYGGEIRSSEDLERRAVEFGSKIAITDGREKVWKRGGVQVGEVTELSAERQRRRRVYLVPGGYLLVEVDGQKAEISKRGASTLIILGNRFTRDFAFKRLGSGMPPDEASLRSLFEEVGRLTASVSPDYTILISDSVHPDPEAVLLRALKEDCEEGGWELSGPA

SEQ ID NO: 95 - protein, 196 aa, Methanosaeta harundinacea
  >WP_014586755.1 Methanosaeta harundinacea Adriase
SLVVGFAGKKRAIVAGDKRSIAFFGRAEELEEELYGGEIRSREDLQRRCEELGSKVAIADGREKVWDRGGVLAGEVTEISAERERRRRIYLVPGGYLLVEVDGKRAEISKRGASTLIILGNRFTRDFAFKRLGSGRPPDEASIRALFEEAGRATASVSPDYTVLTSSSIHRDPEAALLRALREDCEEGGWELCGLA

SEQ ID NO: 96 - protein, 200 aa, Methanoculleus taiwanensis
  >WP_128693800.1 Methanoculleus taiwanensis Adriase
SLVIAFIGARGAVMAGDMREILFSGDDSCRDRLEAELYDGRIVTDEALARRAQEIGIGVYVRDTKNKVAERSGILVGEVGETEKGVVRSRRLYASAGRYAIADFEDGCMTVVSQGTGSTFIVLGNAIAKQVTNRCIRDTWKGGTPRDAVRTIVLAMETAARTTASVSERYVLVQTPASRDLRPLLDEDARRGEERSNSAE

SEQ ID NO: 97 - protein, 207 aa, Methanofollis ethanolicus
  >WP_067053047.1 Methanofollis ethanolicus Adriase
SLVIAFVGSKSAVMAGDMREIFFWGDETAVQALEKELYGGGLVADNDLYRRAEALGVGVVVRDGREKVREQDGVLVGEVRETVGGTVRARRLYATAGRYAIAEFEGSCGRLTGKGTGSTFVVLGNRAAQAIALASIREGWKDGGTEDAVRVIILVMKTAAAATASVSKRFVLIRTEAGADLDTLLARDLGEGEVAMKNTSGIFRKNA

SEQ ID NO: 98 - protein, 193 aa, Methanoculleus sp. SDB
  >KQC03708.1 Methanoculleus sp. SDB Adriase
TLVMAFVGKNGAAVAGDMREILFRGDEARRRELESELYDGRIVTDADLEKRAAEIGVRISVRDDKSKVIRRDDGILTGEVSKFERGTVSRRRIYAVAGQYAIADFEGGRMVIVQKKEGSAFVVLGNDITKKIANEIIRKNWKNGGFEDAVRVIVLAMEEAGRRTASVSRAFSIEQTDINVNISAIVDSEAEGS

SEQ ID NO: 99 - protein, 207 aa, Candidatus Methanoperedens sp. BLZ2
  >WP_097297421.1 Candidatus Methanoperedens sp. BLZ2 Adriase
SLIIAFVGGTEAAIVADMREITFQGDKVLRERLERKLYRGAIATDIELEKMAEEIGVKIKIRDNKIKVMQRYGALVGEVVSVEDGFVRKRRLYATAGSYMIAETRDSEVKVTNKGGSAFIVLGNNITKEIANKCIRENWKNGGFHEAIKVLILSMEAAAKVSASVSKKFIIIQTSSNVNLSEVIEQDKIGRKNLPWCSSVYAFGGYD

SEQ ID NO: 100 - protein, 192 aa, Methanosarcina sp. MTP4
  >WP_048178734.1 Methanosarcina sp. MTP4 Adriase
SLVIAFIGKNGAVMAGDMREITFEGEKENREKLEKDLYSGAIVSDAELEKKAEELGVKITVRDDKNKLEERDGVLVGEVSSVEGGVVRKRRLYVSAGNYAIAEIEGSEIRVTAQGKGSNFIAFGNDTTKAIANKCFKDNWKKGNLQLAVKIIMLAMETAARKTASVSKKYMLLQTASNVDVSGVVEKDLSEP

SEQ ID NO: 101 - protein, 192 aa, Methanosarcina sp. Ant1
  >OEU41885.1Methanosarcina sp. Ant1 Adriase
SLVIAFIGKNGAVMAGDMREISFQGEKPDREKLEKELYSGALVTDDELTKKAEELKVKINVTDFKNKVSERDGILIGEVSSFEDGVIKKRRLYASAGNYAIAELRNSKITLTSHGKGSNFIAFGNEFTKQTANKCFQDNWTKKSNFQDAVKILKLCMETAARKTASISKQFVLVQTVSNNDVLNVVEKDRQG

SEQ ID NO: 102 - protein, 192 aa, Methanosarcina horonobensis
  >WP_048140017.1 Methanosarcina horonobensis Adriase
TLVIAFIGKNGAVMAGDLREITFEGEKPDREKLEKELYNGAIVTDEDLAKKAEECGVKIAVTDCKEKVSERDGILVGEVSSVEGGVVKKRRLYAAAGNYAIAELRDSELTLTSQGKGSNFIAFGNEFTKQVANKCFKDHWMKKSTFQDAVKILMLCMETASKATASVSKQFYLIQTTSNVDVLKVVEKDRQG

SEQ ID NO: 103 - protein, 196 aa, Methanosarcina lacustris
  >WP_048125541.1 Methanosarcina lacustris Adriase
TLVIAFIGKNGAVMAGDLREITFDGEKPDMEKLEKELYSGTIVTDEELTKKAEEFGVKIMVTDCKSKVSERNGILVGEVSSVEGSAVKKRRLYASAGNYAIAELRDSELTMTSQGKGSNFIAFGNEFTKQIANKCFTDNWTKKSKLQDAVKILMLCMETAARETASVSKQFVIMQTASNVDVLKVVEKDRKNCIKC

SEQ ID NO: 104 - protein, 192 aa, Methanosarcina acetivorans C2A
  >AAM05704.1 Methanosarcina acetivorans C2A Adriase
TLVIAFIGKNGAVMAGDMREITFEGEKPDREKLEKELYNGAIVTDEELARKAEEAGVKITVTDCKNKVSERNGILVGEVSSVERGIVKKRRLYASAGSYAIAELRDSELTLTSQGKGSNFIAFGNEFTKQVANKCFKDNWTKKSKLQDAVKVLMLCMETAAKKTASVSKQFVIVQTSSNVDVLKLVEKDGGT

SEQ ID NO: 105 - protein, 192 aa, Methanosarcina siciliae
  >WP_048172501.1 Methanosarcina siciliae Adriase
TLVIAFIGKNGAIMAGDMREITFEGEKPDREKLEKELYNGTIVTDEELARKAEEAGVKITVTDCKNKVSERNGILVGEVSSVEGGIVKKRRLYASAGAYAIAELRDLELTLISQGKSSNFIAFGNEFTKQVANKYFKDNWTKKSKLQDAVKILMLCMETAAKKTASVSKQFVIVQTSSNADVLKLVEKDRKS

SEQ ID NO: 106 - protein, 192 aa, Methanosarcina mazei
  >WP_048039088.1 Methanosarcina mazei Adriase
TLVIAFIGKNGAVMAGDMREITFEGEKPDREKLEKELYSGSIVTDEEMQKKAEEFGVKITVADCKEKVSERNGVLVGEVSSVEGGVVKKRRLYASAGNFAIAELTNTEMTLTSQGKGSNFIAFGNEFTKQVANKCFKDNWTKKSNLQDAVKILILCMETVARKTASVSKQFMIVQTASNADVLKVVEKDRHC

SEQ ID NO: 107 - protein, 192 aa, Methanosarcina mazei
  >WP_048036387.1 Methanosarcina mazei Adriase
TLVIAFIGKNGAVMAGDMREITFEGEKPDREKLEKELYSGSIVTDEKMQKKAEEFGVKITVADCKEKVSERNGVLVGEVSSAEGGVVKKRRLYASAGNFAIAELINTEMTLTSQGKGSNFIAFGNEFTKQVANKCFKDNWTKKSNLQDAVKILILCMETVARKTASVSKQFMIVQTASNADVLKVVEKDRNC

SEQ ID NO: 108 - protein, 192 aa, Methanosarcina
  >WP_011034811.1 Methanosarcina Adriase
TLVIAFIGKNGAVMAGDMREITFEGEKPDREKLEKELYSGSIVTDEEMQKKAEEFGVKITVADCKEKVSERNGVLVGEVSSAEGGVVKKRRLYASAGNFAIAELINTEMTLTSQGKGSNFIAFGNEFTKQVANKCFKDNWTKKSNLQDAVKILILCMETVARKTASVSKQFMIVQTASNADVLKVVEKDRNC

SEQ ID NO: 109 - protein, 192 aa, Methanosarcina
  >WP_048127718.1 Methanosarcina Adriase
TLVIAFIGKNGAVMTGDMREIIFEGDSSQRQKLEKELYSGAIVTDEELEKKAEELGIKITVTDCKSKVSERNSILIGEVSSVEGGIVKKRRLYASAGNYAIAELRDSELTLTSQGKGSNFIAFGNEFTKQVANKCFKDNWTKKSNLQDAVKILMLCMETAAKKTASVSKQFVIMQTASNVDVLKIVEKDRNS

SEQ ID NO: 110 - protein, 192 aa, Methanosarcina
  >WP_048138687.1 Methanosarcina Adriase
TLVIAFIGKNGAVMAGDMREITFEGERPDREKLEKELYSGAIVTDEELAKKAEELGVKITVTDCKSKVSERNGILVGEVSSVEGGVVKKRRLYASAGNYAIAELRDSELTLTSQGKGSNFIAFGNEFTKQIANKCFKDNWTKKSNLQDAVKILMLCMETAAKKTASVSKQFVIVQTSSNVDVLKVVEKDRKS

SEQ ID NO: 111 - protein, 192 aa, Methanosarcina sp. 1.H.T.1A.1
  >WP_048136381.1 Methanosarcina sp. 1.H.T.1A.1 Adriase
TLVIAFVGKNGAVMAGDMREITFEGEKSDREKLEKELYSGEIVIDEELAKKAEEFGVKITVTDCKSKVSERNGILVGEVSSVEGGVVKKRRLYASAGNYAIAELRDSELTLTSQGKGSNFIAFGNEFTKQVANKCFKDNWTKKSNLQDAVKILMLCMETAAKKTASVSKQFVIVQTASNVDVLKIVEKDRKG

SEQ ID NO: 112 - protein, 192 aa, Methanosarcina sp. 2.H.A.1B.4
  >WP_048170135.1 Methanosarcina sp. 2.H.A.1B.4 Adriase
TLVIAFVGKNGAVMAGDMREITFEGEKSDREKLEKELYSGEIVTDEELAKKAEEFRVKITVTDCKSKVSERNGILVGEVSSVEGGVVKKRRLYASAGNYAIAELRDSELTLSSQGKGSNFIAFGNEFTKQVANKCFKDNWTKKSNLQDAVKILMLCMETAAKKTASVSKQFVIVQTASNVDVLKIVEKDRKG

SEQ ID NO: 113 - protein, 192 aa, Methanosarcina sp. 1.H.A.2.2
  >WP_048161572.1 Methanosarcina sp. 1.H.A.2.2 Adriase
TLVIAFVGKNGAVMAGDMREITFEGEKSDREKLEKELYSGEIVTDEELAKKAEEFGVKITVTDCKSKVSERNGILVGEVSSVEGGIVKKRRLYASAGNYAIAELRDSELTLTSQGKGSNFIAFGNEFTKQVANKCFKDNWTKKSNLQDAVKILMLCMETAAKKTASVSKQFVIVQTASNVDVLKIVEKDRKG

SEQ ID NO: 114 - protein, 192 aa, Methanosarcina sp. MSH10X1
  >WP_128507564.1 Methanosarcina sp. MSH10X1 Adriase
TLVIAFIGKNGAVMTGDLREITFEGDKPDREKLEKELYSGAIATDGELAEKAREFGVGITVTDCKSKISERNGVLAGEVSSIEGGVVKKRRLYASAGNYAIAELIDFELTLTSHAKGSTLIVLGNEFTKQVANKCFKDNWTKKSTFQDAVKILMLCMETAARKTASVSQQFYLIQTMSSVDVLKAVEEDRKG

SEQ ID NO: 115 - protein, 194 aa, Methanosarcina flavescens
  >WP_054300058.1 Methanosarcina flavescens Adriase
TLVIAFIGKNGAVMTGDLREITFEGDKQDREKLEKELYSGAIVTDDELAEKARKFGVGITVTDCKSKISEKNGVLVGEVSSIEGGVIKKRKLYASAGNYAIAELRDSELTLTSHAKGSTLIVLGNEFTKQIANKCFKDNWTKKSTFQDAVKILMLCMETAARKTASVSQQFYLIQTTSNVDVLKAVEMDKTQKA

SEQ ID NO: 116 - protein, 194 aa, Methanosarcina thermophila
  >WP_048168365.1 Methanosarcina thermophila Adriase
TLVIAFIGKNGAVMTGDLREITFEGDKQDREKLEKELYSGAIVTDDELAEKAREFGVSITVKDCKSKIFERDGVLIGEVSSIEGGVVKKRRLYASAGNYAIAEIRDSELTLTSHAKGSTLIVLGNEFTKQIANKCFKDNWTKKSTFQDAVKILMLCMETAARKTASVSQQFYLIQTTSNVDVLKAMEIDKTQEA

SEQ ID NO: 117 - protein, 194 aa, Methanosarcina thermophila TM1; identical to SEQ ID NO: 116
  >AKB12469.1 Methanosarcina thermophila TM1 Adriase

SEQ ID NO: 118 - protein, 192 aa, Methanosarcina barkeri
  >WP_048117266.1 Methanosarcina barkeri Adriase
TLVIAFIGKNGAVMTGDLREITFDGDKSNREKLEKELYNGTIVTDDELAKKAREFGVGITVMDCKSKISERDGILIGEVSSIVCGVIKKRRLYASAGNYAIAEFKDSEITLTSHAKGSNLIVLGNDFTKQVANKCFKDNWTKKSTFQDAVKILMLCMETAARKTASVSKQFYLIQTTSNVDVLKIVDKDRNN

SEQ ID NO: 119 - protein, 192 aa, Methanosarcina barkeri
  >WP_048106651.1 Methanosarcina barkeri Adriase
TLVIAFIGKNGAVMTGDLREITFEGEKPNREKLEKELYNGTIVTDNELANKAREFGIVITVTDCKNKISERDGVLIGEVSSIEDGVTKKRRLYTSAGNYAIAELRDSEITLTSHAKGSNLIVLGNDFTKQVANKCFKDNWTKKSTFQDAVKILILCMETAARKTASVSKQFFLIQTTSSVDVLKIVEKDRNS

SEQ ID NO: 120 - protein, 192 aa, Methanosarcina barkeri
  >WP_011308259.1 Methanosarcina barkeri Adriase
TLVIAFIGKNGAVMTGDLREITFEGEKPNREKLEKELYNGTIVTDDELAKKARAFGVGITVTDCKSKISEREGILIGEVSSIEGGVTKKRRLYASAGNYAIAELKDSKITLISHAKGSNLIILGNDFTKQVANKCFKDNWTKKSTFQDAIKILMLCMETAARKTASVSKQFFLIQTTSNVDVLKIVEKDRNN

SEQ ID NO: 121 - protein, 192 aa, Methanosarcina spelaei
  >WP_095644589.1 Methanosarcina spelaei Adriase
TLVIAFIGKNGAVMTGDLREITFEGEKQNRDKLEKELYNGTIVTDDELANKAREFGIGITVTDCKSKISERDGVLIGEVSSIEGGVTKKRRLYASAGNYAIAELRNSEITLTSHAKGSNLIVLGNDFTKQVANKCFKDNWTKKSTFQDAVKILILCIETAARKTASVSKQFFLIQTASNVDVLKIVEKDRNS

SEQ ID NO: 122 - protein, 192 aa, Methanosarcina vacuolata Z761
  >AKB44029.1 Methanosarcina vacuolata Z761 Adriase
TLVIAFIGKNGAVMTGDLREITFEGEKQNREKLEKDLYNGTIVTDDELAKKAREFGVGITVTDCKSKISERDGILIGEVSSIEGGVTKKRRLYASAGNHAIAEIRDSEITLTSHTKGSNLIVLGNDFTKQVANKCFKDNWTKKSTFQDAIKILILCMETAARKTASVSKQFFLIQTTSNVDVLKIVEKDRNN

SEQ ID NO: 123 - protein, 192 aa, Methanosarcina sp. Kolksee
  >AKB47506.1 Methanosarcina sp. Kolksee Adriase
TLVIAFIGKNGAVMTGDLREITFEGEKQNREKLEKDLYNGTIVTDDELAKKAREFGVGITVTDCKSKISEREGILIGEVSSIEGGVTKKRRLYASAGNHAIAEIRDSEITLTSHTKGSNLIVLGNDFTKQVANKCFKDNWTKKSTFQDAIKILILCMETAARKTASVSKQFFLIQTTSNVDVLKIVEKDRNN

SEQ ID NO: 124 - protein, 192 aa, Methanosarcina vacuolata; identical to SEQ ID NO: 122
  >WP_048123851.1 Methanosarcina vacuolata Adriase

SEQ ID NO: 125 - protein, 192 aa, Methanosarcina sp. Kolksee; identical to SEQ ID NO: 123
  >WP_048158264.1 Methanosarcina sp. Kolksee Adriase

SEQ ID NO: 126 - protein, 189 aa, Methanolinea sp. SDB
  >KQC10780.1 Methanolinea sp. SDB Adriase
SLVICFSGKKGAIIAGDTREILFGGDDDAVSALEEELYSGAITTEGDLQERARSLGVTIVIRDGREKVSRRGDILIGEVGERERDRVRKRRVYATAGSYALAEVHNSRIISAERRAGAGFVVLGNEMTKRIANQCIRDYWKAGTLDDAVRVIVMAMETASRVTPTVSKQYSLLQTRGRGDLLALLEGEK

SEQ ID NO: 127 - protein, 191 aa, Methanoculleus thermophilus
  >WP_066953911.1 Methanoculleus thermophilus Adriase
TLVIAFVGKHGAVMAGDMREIAFQGDDSCIEELECELYSGRITSDSELNTRADEVGVTIQVRDDKAKVSQQDGVLIGEVTESDGPAVRRKRLYATTGKFAIAEVTHSQLKVTERGGASNFVVLGNEITKRIANQCIQGAWEGGSVPDAIRLIMLIMQIAASVTASVSRTFILVHTDLTGNLDDAISQGLRV

SEQ ID NO: 128 - protein, 191 aa, Methanoculleus bourgensis
  >WP_014868173.1 Methanoculleus bourgensis Adriase
TLVIAFIGKQGAVMAGDMREIAFFGDDSCIEELERELYNGLIASDDELKGRASEIGVTIRVRDDKAKVSQRDGVLIGEVTETDGSAVAKKRLYATRGSYTIAEVIDSRLRVTRRGSASNFVVLGNNITKQIANQCIQGAWEGGTISDAIRLIMLTMQIAASVTASVSRTFILVHTDLAANLGSAIEQDSRG

SEQ ID NO: 129 - protein, 191 aa, Methanoculleus bourgensis
  >SAI88311.1 Methanoculleus bourgensis Adriase
TLVIAFIGKQGAVMAGDMREIAFLGDDSCIEELERELYNGLIASDDELKERASEIGVTIRVRDDKAKVLQRDGVLIGEVTETDGLAVARKRLYVTKGSYVIAEVIDSRLRVTRRGSASNFVVLGNNITKQIANQCIQGAWEGGTISDAIRLIMLTMQIAASVTASVSRTFILVHTELAANLSSAIEQDSRG

SEQ ID NO: 130 - protein, 191 aa, Methanoculleus bourgensis; identical to SEQ ID NO: 129
  >WP_082864992.1 Methanoculleus bourgensis Adriase

SEQ ID NO: 131 - protein, 191 aa, Methanoculleus sp. MAB1
  >CVK34221.1 Methanoculleus sp. MAB1 Adriase
TLVIAFIGKQGAVMAGDMREIAFLGDNACIEELERELYNGLIASDDELKERASEIGVTIRVRDDKAKVSQRDGVLIGEVTETDGLAVARKRLYVTKGSYVIAEVIDSRLRVTRRGSASNFVVLGNNITKQIANQCIQGAWEGGTISDAIRLIMLTMQIAASVTASVSRTFILVHTDLAANLGSAIEQDSRG

SEQ ID NO: 132 - protein, 210 aa, Methanocaldococcus jannaschii
  M. jannaschii Adriase deltaOB S1A-GS-His6
MALIICYYGKNGAVIGGDRRQIFFRGSEENRKILEEKLYSGEIKSEEELYKLAEKLNIKIIIEDDREKVRKISDSVVCGEVRSLGIDAKRRRVYATKGKCAIVDILNDTVTNQTIKEGFGIVVLGNRFLKKKAEEELKRTAKLFPMMPIQQIEDAIKEIFEKLKWHPTVSKEYDIYSVNKYEKNFEEVIKKDIESLFKYREQGSHHHHHH

SEQ ID NO: 133 - protein, 192 aa, Methanomicrobiales archaeon HGWMethanomicrobiales6
  >PKL55839.1 Methanomicrobiales archaeon HGWMethanomicrobiales6 Adriase
TLVIAFIGNQGAVMAGDMREIAFGGDDSRIEDLERELYSGSITSDTDLAERADEMGVTIRVRDDKAKVSQQDGVLVGEVTETEGAAVAKRRLYATTGSYAIAEVLDSRLRVMQRGRASNFVVLGNDITKKIANQCIQGMWEGGTIQDALRLLMLTMQIAASATASVSRTFILVHTDRAANLADAIDRDSHRE

SEQ ID NO: 134 - protein, 191 aa, Methanomicrobiales archaeon HGWMethanomicrobiales2
  >PKL61271.1 Methanomicrobiales archaeon HGWMethanomicrobiales2 Adriase
TLVIAFIGRQATVMAGDMREIAFEGDDSCIEELEREIYSGSITSDTDLAARADEIGVTIRVRDDKAKVSQQDGVLIGEVTETEGPVTRRKRLYATAGSYAIAEAIDSRLRVTQRGRASNFVVLGNEVTKRIANQCIQGMWEGGTIQDAMRLLMLTMQITASVTASVSRTFILVHTDRAANLADTINRDLRK

SEQ ID NO: 135 - protein, 196 aa, Methanoculleus sediminis
  >WP_048184178.1 Methanoculleus sediminis Adriase
TLVIAFIGKQGAVMAGDMREIAFGGDDASIEDLERELYDGSIASDSDLAQRAGEIGVTIRVRDDKAKVSQRDGVLVGEVTETEGAKTSRKRLYATKGSYVIAEIVDSRLRVMQKGQASNFVVLGNDITKRIANQCIQGMWEGGTIQDALRLIMLTMQIAASVTASVSRTFVLVHTDSAADITTAIATDSRKEQNPD

SEQ ID NO: 136 - protein, 196 aa, Methanoculleus marisnigri
  >WP_011844100.1 Methanoculleus marisnigri Adriase
TLVIAFIGKQGAVMAGDMREIAFGGDDSSIEDLERELYGGSIASDSDLAKRADEIGVTIQLRDDKTKVSQRDGVLVGEVTETEGAKTSRKRLYATKGSYVIAEIVDSRLRVMQKGQASNFVVLGNDTTKEVANQCIQGMWEGGTIQDALRLIMLTMQIAASVTASVSRTFVLVHTDIAADVPAAIANDSRKEQNPD

SEQ ID NO: 137 - protein, 196 aa, Methanoculleus sp. MH98A
  >WP_048113726.1 Methanoculleus sp. MH98A Adriase
TLVIAFIGKQGAVMAGDMREIAFGGDDSSIEDLERELYGGAIVSDSDLAKRADEIGVTIQLRDDKTKVSQRDGTLVGEVTETEGANISRKRLYATKGSYVIAEIVDSRLRVMQKGRASNFVVLGNDITKRVANQCIQGMWEGGTIQDALRLIMLTMQIAASVTASVSRTFVLVHTDTAADIPAAIANDSRKEQNPD

SEQ ID NO: 138 - protein, 196 aa, Methanoculleus chikugoensis
  >WP_074370403.1 Methanoculleus chikugoensis Adriase
TLVIAFIGEQGAVMAGDMREIAFGGDDSLIEELERELYGGSIASDRDLAERADAIGVTVRVRDDKAKVSQRDGVLVGEVTETEGVKTSRRRLYATKGRYAIADVVDSRLRVTQRGRASNFVVLGNDITKEVANQCIRGMWEGGTIQDALRLIMLTMQIAASVTASVSRTFVLVHTDIAADISGAIANDSRKGQNPD

SEQ ID NO: 139 - protein, 196 aa, Methanoculleus horonobensis
  >WP_067073447.1 Methanoculleus horonobensis Adriase
TLVIAFIGKQGAVMAGDMREIAFGGDDSLIEELERELYDGSIASDRDLAERADAIGVAIRVRDDKAKVSQRDGMLVGEVTETEGAKTSRKRLYATKGNYAIAEVVESRLQVTQKGRASNFVVLGNEITKRVADQCIQGMWEGGTIRDALRLIMLTMQIAASVTTSVSRTFVLVHTDTMADISGAIANDARKEQKPD

SEQ ID NO: 140 - protein, 189 aa, Methanoregulaceae archaeon PtaU1.Bin066
  >OPY42232.1 Methanoregulaceae archaeon PtaU1.Bin066 Adriase
SLVMAFSGTYSAVIAGDQREILFRGEASCIALLESELYSNRLCTEEQLHARAAELDVSITIRDDKCKVWEQDGILIGEVTETDGPVIRKRRICVSCGRYAIFEKSGESWSLLSRGEGSHFLVLGNEATKGIAHQCIREHWKPGGGTLEDAVKVLILSMQEAARRTASVSRTFSILQTRTKADVPCSLGM

SEQ ID NO: 141 - protein, 189 aa, Methanoregulaceae archaeon PtaU1.Bin059
  >OPY42561.1 Methanoregulaceae archaeon PtaU1.Bin059 Adriase
SLVIAFCGKERAFMAGDRREIFFSGNDSATGRLEEELYSGEIWDEEGLFRRAGKLGVRLFVHDGKCKVTERNGVLVGEVSESEGEQKRTRRLLVTAGTYAISEIREGKEVEVARGQASRFIVLGNRVMQEVANWCIRSCWKENGGSPADALRVILVTMKEAAAATPSVSRGYTLVQTTRCGAPETGPGG

SEQ ID NO: 142 - protein, 185 aa, Methanolinea tarda
  >WP_007313979.1 Methanolinea tarda Adriase
SLVIAFCGRDRSFMAGDRREIVFRGDDLRTRTLEDELYSGRIRSRDALHERARELGIDLWIHDDRCKAWEEDGILIGQVNERDGLSTRSRRLCVSCGNYVITEVLEGIKREVTRGCASRFIVLGNKTTQEIAHRCIRSHWSDTGGTPADALRIIILAMEEAASLTPSVSGTYTLVQTTAKTVLPP

SEQ ID NO: 143 - protein, 219 aa, Methanoregulaceae archaeon PtaB.Bin152
  >OPX76491.1 Methanoregulaceae archaeon PtaB.Bin152 Adriase
SLVIAFCGRDRSFMAGDRREIVFRGDDLRTRTLEDELYSGRIRSRDALHERARELGIDLWIHDDRCKAWEEDGILIGQVSERDGLSTRSRRLCVSCGNYVITEVQEGIKREVTRGCASRFIVLGNKTTQEIAHRCIRSHWSDTGGTPADALRIIILAMEEAASLTPSVSGTYTLVQTTAKTVLPPQGKTQRSLVFPIFFLSFAIPGGQCDTEGRGVRLP

SEQ ID NO: 144 - protein, 321 aa, Methanopyrus sp. KOL6
  >WP_088335494.1 Methanopyrus sp. KOL6 Adriase
TLVLAYAGTDGALVAGDHRILVARMDEEKMREVEEKLYSGEIRTEEELESFLKDLEVEGGYFEFHDDRKKVWKVNDEVVAGEVGVRSAKGVRRRRVYATPGAHAIIELEGEKVLSKNFGGPALIVEGPKVVKELVIEFVDSELGGKPDLESLRNALDDIFEYVSSNTVLVSSEYDAFEVKGRVDHLARIHLQKAIDEDIERLRKYRRRLVEEMLKHIREGYDILKEGVVGEVVEVGTEEEGEGVEDVPPERRIVVRLVEDVDARHMGDVVAGPGEEIVMAVEGDPEKVEPGDTVVVKDGIMKIDGKDLPVVTGYSICRTRR

SEQ ID NO: 145 - protein, 321 aa, Methanopyrus kandleri AV19
  >AAM01502.1 Methanopyrus kandleri AV19 Adriase
TLVLAYAGTDGALVAGDRRTLVARMDEEKMRKVEEKLYSGEIRTEEELESFLKDLDVEDGYFEFHDDRKKVWKVNDEVVAGEVGVRSAKGVRRRRVYATPGAHAIVELEGEKVLSKNFGGPALIVEGPKVVKELVIEFVNSELGGKPDLESLRNALDDLFEYVSSGTILVSSEYDAYEVKGKADPLARARLQKAIDEDIERLREHRRRLAEEMLKHIREGYDILKEGVVGEVVEVGTEEEGKGVEDVPPERRIVVRLAEDVDARHMGDVVAGPGEEIVMAVEGNPEEVEPGDRVVVKDGVMKIDGKDLPVITGYSICRTRR

SEQ ID NO: 146 - protein, 289 aa, Methanococcus voltae
  >WP_013180795.1 Methanococcus voltae Adriase
SVIIGYYGNNGSAIAGDKRNILFRGSEANREKLESLLYNGKLKNDKELKEKAEEYDVKVHITDSQDKIKKLDGCLMGEVKTISNQSKRKRMYLSKNNCALVEIIDDDMTKKEIKKGSGIIIFGNKHLKQLVQAELQKNVNIVKSGDILKIEKLFKDILSNIDTPSSSNDVDSYSNFKYENLEKVISQELSNLVDYRNGLKNQIIKVQKLMLIEKKIATKGEIGYVNEGKLKLYDKYLAIDRICENPNLYYEIDITGDVKEGDIILIDENNLKVKNKDVIVSVNKIICNR

SEQ ID NO: 147 - protein, 290 aa, Methanococcus aeolicus
  >WP_011973890.1 Methanococcus aeolicus Adriase
SIIVGYYGANGAVVGGDKRNIIFRGNAEQREELEKLLYSGNIKTDEEFKKIADEYGIKVYIEDKQLKVREVNGVLVGEVKSIGTDSQRRRMYLSTGNCAIIDILNDTITKKSSNVGHGLILFGNRYLKEIVHNELKKDAPNFKNMPIEKVKNIIENAIKRCDGPTVSEEIILLHTKDKHNNFKELIKKDINDLKEYRNGLRQQMIDIKKTMLIAEKIEINGEVGYIKNGKLVLDENHLAIDTICSNPNLYNEIEIKGEYEEGDIIYIDNGELKVKGKDSSVCVDKIICKA

SEQ ID NO: 148 - protein, 290 aa, Methanothermococcus thermolithotrophicus
  >WP_018153627.1 Methanothermococcus thermolithotrophicus Adriase
SVIIGYYGKNGAVIAGDRRNILFRGDPKKREELEKKLYSGELKSDEELIRAAKDLGINIHIDDEKIKVRKIEDVLVGEVSSIGAESKRRRMYITKGKCAIIDILNDTITNKSIREGSSIVVFGNKYIKNLVQQELVKYKNKILKMSILEIKNLFEEILKNCNNPTVSKKYDVFYTVNCSKNFEETIENDIKDLFNYRNELNKKMFEFGKIMTIVNKIANEGEIGTIKNGKLVLNDDHIAIDKVCPNPKLFTEIEVEGNFEDGDIVVIENGNMKIKGKNENITTKYIVCKK

SEQ ID NO: 149 - protein, 291 aa, Methanococcales archaeon HHB
  >GBF37010.1 Methanococcales archaeon HHB Adriase
SIVIGYYGNNGAVIGGDKRNIIFRGDPKKREELEKKLYSGKIKDEEELKKVAEELGVKVYIEDERVKVKKINNTLVGEVRSIGADSRRRRMYLTKGMCVIVDILNDDVIGKSVKRGNGVIIFGNKHLKEIARKELRKYMYDFTRMGIGEVKDVIEGVLKRCCRGPTSSKDFDILYIDEGEKDLEKVIEEDLEELRRYREELRQKMIDFRKVLAIVDKIENNGEVGIIKDGKLVLNEDHLAIDKICPNPRQFREIEIEGDVEDGDIVVIENGTLKVKGKDAILKTNYIICRK

SEQ ID NO: 150 - protein, 291 aa, Methanococcales archaeon HHB; identical to SEQ ID NO: 149
  >WP_131007839.1 Methanococcales archaeon HHB Adriase

SEQ ID NO: 151 - protein, 290 aa, Methanothermococcus okinawensis
  >WP_013866916.1 Methanothermococcus okinawensis Adriase
SIVIGYYGNNGAVVAGDRRNIMFRGNPEKRAELEKDLYCGKIKNEEELKNRAEELGVKIFIEDERTKVKKIGDVLVGEVKSIGADSKRRKMYLTKGNCAIVDILNDTITNKSIKNGSSIIIFGNKYLKDIVQKELKKYMNNFGKMDILDVKNTIENALKKCDGPTLSPELDILHTNKKVFNLEEIIEKDLNDLKEYRNDLKQKMIDFKKVMIIADKIENNGEVGIIKNGKLVLDDNHIAIDKVCPNPKLFNEIEIEGDVEDGDVVLIEDGSLKIKGKDIPLAINHIICKK

SEQ ID NO: 152 - protein, 291 aa, Methanotorris igneus
  >WP_013799607.1 Methanotorris igneus Adriase
SLIIGYYGRNGAVLGGDKRNIMFRGDIEKRKKLEEMLYNGEIKDDEELLKKAEEFGIKLHIEDNRKKVRKIGDDVLVGEVKSIGIDSERRRVYLTKGKCIIVDVFNDEIRNKWTKTGSGVVVFGNRYVKKIAEEEFRKAGYRLTMMSLEEIRDLIENIFKKCNTPSVSKGYDIIYTTKECKNLEEVVKKDLDALFEYRETLRKKMIDFGKVMTIVNKIVKNGEIGVIKNGKLVLYDKYIAIDKICPNPKMFNEIEVKGDVEDGDVIVIENGEMKVKGKNTPVFVDYTICEK

SEQ ID NO: 153 - protein, 291 aa, Methanotorris formicicus
  >WP_007043881.1 Methanotorris formicicus Adriase
SVIIGYYGKNGAVLGGDKRRIMFRGDVEKRKMLEKLLYNGEIKNDEELLKKAEELGIKLHIEDGKKKVRKIGNDVLVGEVKTIGIDSKRRRVYLTKGKCMIVDVFNDEIKNKLIKTGSGVVVFGNKYVKKIAEDEFKKIGHRLTMMSLEEIKDIIENIFKKYDTPSVSKEYIVVYTTKECKNLEEVVKKDLDELFEYRETLRKKMIDFSKVMTIVNKIVKNGEVGVVKNGKLVLYDKYIAIDKICPNPNIFNDIEIRGDVEEGDVVVIENGEMKIKGKNTPVFVDHIICEK

SEQ ID NO: 154 - protein, 291 aa, Methanocaldococcus infernus
  >WP_013100627.1 Methanocaldococcus infernus Adriase
SLILCYFGNNGAIILGDRREMFFRGNEEKRKELEELLYSGEIKSEEELRKKAEELGVKIIIEDKRRKVWKIKNVVVGEVRSLGLDAKRRRVYATKRKAKILEILNDQIIGEKNLEGFSIIIFSNKFIKEEINKYLKEYYRVLPMKRIDEVGEIFKEIYKKVSWHPTLSEEFDVEKTDKEEEDFEEVIEEDVKKLFEYREELKKKLVDFGKVMDIVNRIVKNGEIGEVKNGKLHLFDDYIAVDSIKPNPKTYKVIDIEGAEDGDIIVIENGEMKVKGKDKKVNTNYIIIKSW

SEQ ID NO: 155 - protein, 291 aa, Methanocaldococcus villosus
  >WP_004589885.1 Methanocaldococcus villosus Adriase
SLVICYYGNNGAVMAGDRRQMFFKGPEEKRKILEEKLYSGEIQNEEDLYKLADDLGVKVIIEDNREKVRKIGNTLVGEVRSIGLEAKRRRVYATKGKCMILEILGDVITDRMLKNGAGLIVFGNRYLKNKAEKILKNVAKDFPKMDIDEVGKVIKDVFERFKEHPTISREYDIYVTKNIDINFEKTVEEDINKLFKYREDIRKKMIDFGKVMSIVNKIVKNGEVGVIKEGKLHLYDQYIAIDKISPNFKTFRIIDVKGDVEDGDIVVIENGDMKIKNKGIKVMTDYIICYK

SEQ ID NO: 156 - protein, 292 aa, Methanocaldococcus vulcanius
  >WP_015733029.1 Methanocaldococcus vulcanius Adriase
TLVICYYGKNGAVIGGDRRQIFFRGNEEKRKLLEEKLYSGEIKTEEELYKLAEELGVKIIIEDDREKVRKISDTVVCGEVRSLGVDAKRRRVYATKGKCAIIDILNDTITKEIIKEGFGLVIFGNKFLKNRAEEELRNKAKLFPMMPIQQIESEIREIFEKLKWHPTVSKEYDIYSVNKYEKNFEEVIKKDIGDLFEYREKLRQQLIDFGKVMSIVNKIVKNGEIGVIKDGKLHLYDEYIAVDKIDPNPNTFKIIEVKGNFKDGDVIVIENGDMKVKGTDERVETDYIIISK

SEQ ID NO: 157 - protein, 291 aa, Methanocaldococcus fervens
  >WP_015791349.1 Methanocaldococcus fervens Adriase
SLIICYYGKNGAVIGGDKRQIFFRGNEEKRKILEEKLYNGEIKSEEELYKLADELNIKIIIEDNREKVRKISDSVVVGEVRSLGIEAKRRRVYATKGKCAIVDILNDTVTNEVIKEGFGIVVLGNRFLKKKAEEELKSSAKLFPMMPLEQIENVIRDIFEKLNWNPTISKEYDIYSVDKYEKNFEEVVRKDIESLFKYRDELRKQLIEFGKVMTIINKIVKNGEIGVIKDGKLHLYDNYIAIDKIDPPNVFKVVEVEGNFKDGDVVVIENGEMKIKGTNEKIMTKYIICHK

SEQ ID NO: 158 - protein, 292 aa, Methanocaldococcus sp. FS40622
  >WP_012979926.1 Methanocaldococcus sp. FS40622 Adriase
SLIICYYGKNGAVIGGDRRQIFFRGEEQKRKILEEKLYSGEITSEDELYNLARELNIKIIIEDDREKVRKISDSVVVGEVRSLGIDARRRRVYATKGKCAIIDILNDTVTNQMIKEGFGVVVLGNRFLKKKAEEELKRTAKLFPMMPLQQIEDAIKEIFEKLKWHPTISKEYDIYSVNKYEKDFEEVIKKDIESLFKYREQLRKQLIDFGKVMSIVNKIVKNGEIGVIKDGKLHLYDNYIAIDKIDPNPKVFKVVEVEGNFKDGDIVVIENGDMKIKGTNEKLTTNYIIIHK

SEQ ID NO: 159 - protein, 292 aa, Methanocaldococcus jannaschii
  >WP_010870052.1 Methanocaldococcus jannaschii Adriase
SLIICYYGKNGAVIGGDRRQIFFRGSEENRKILEEKLYSGEIKSEEELYKLAEKLNIKIIIEDDREKVRKISDSVVCGEVRSLGIDAKRRRVYATKGKCAIVDILNDTVTNQTIKEGFGIVVLGNRFLKKKAEEELKRTAKLFPMMPIQQIEDAIKEIFEKLKWHPTVSKEYDIYSVNKYEKNFEEVIKKDIESLFKYREQLRKQLIDFGKVMSIVNKIVKNGEIGVIKDGKLHLYDDYIAIDKIDPNPKVFKVVDVEGNFKDGDIVVIENGDMKIKGTNEKVTTKYIIIHK

SEQ ID NO: 160 - protein, 292 aa, Methanocaldococcus bathoardescens
  >WP_048201244.1 Methanocaldococcus bathoardescens Adriase
SLIICYYGKNGAVIGGDRRQIFFRGNEENRKILEEKLYSGEIKSEEELYKLAKELDIKIIIEDNREKVRKISDSVVVGEVRSLGIDAKRRRVYATKGKCAIVDILNDTVTNQTIKEGFGIVVLGNRFLKKSAEEELKRTAKLFPMMPLEQIEDTIREIFEKLKWNPTISKEYDIYSINKYEKNFEDVVKKDIESLFKYREELRKQLINFGKIMTIVNKIVKNGEIGVIKDGKLHLYDNYVAIDKIDPNPNVFKVVEVEGNFKDGDIIVIENGNMKIKGTDERVTTKYIICHK

SEQ ID NO: 161 - protein, 290 aa, Methanococcus vannielii
  >WP_012066013.1 Methanococcus vannielii Adriase
SVIIGYYGKNGVVIAGDKRTILFNGEEKKREMLEELLYSGKIKNDDDLSEKSAEFSVKVHILDDQKKIKQLENTLIGEVRTIGKDSKRKKMYLSKDICVILDIENDNIVKKSVKTGTGIVVFGNKYVKKIVELELKKYLSEISKMDVLKIRTIFEKILVGIENPTLSKGYDFLYCQNAEKDIESIIKKDLNDLREYREELSIKMAEMQKLMTIVNKIAKSGEIGIIKNGSLVLNESFLAIDKICLNPEIYSEIDINGNFKEGDLIEIQNGELTVKGTNNYVSVQKIICNR

SEQ ID NO: 162 - protein, 290 aa, Methanococcus maripaludis
  >WP_011869407.1 Methanococcus maripaludis Adriase
SVIIGYYGKNGAVIAGDSRNLLFKGIKSNREKLEELLYSGKIRTDEELMKKASEFDVNVYINDSEEKVRILGNLLCGEIKSIGKDSKRRRMYLSKEKCAVLDIENDQITNKSVKTGSGIVVFGNKYIKSLVESEIKKYIKDILKMSVKEIKNLFEKILEKTENATLSGKFEYYFVETYENNFEMAVEDDLNELFEYRKELSLKMVEMQKVMMIADKIVKIGDVGKIENGNLVLYDDFLAIDKICPEPTIYCEIEITGEFIEGDVITIDNESLKVKRTGNPVVVEKIICKK

SEQ ID NO: 163 - protein, 290 aa, Methanococcus maripaludis
  >WP_012193694.1 Methanococcus maripaludis Adriase
SVIIGYYGKNGAVIAGDRRNLLFNGIESNRKKLEELLYSGKIRTDEELMKKASEFDVNVYINDSEEKVRSLGTLLCGEVKSIGKDSKRRRMYLSREKCAVIDIENDRITNKSVKTGSGIVVFGNKYIKNLVESEIKKYIKNILKMSAEEIKNLFVKILENTKNATLSGNFEYHFVETYENNFEKVIEDDLNELFDYRKELSIKMIEMQKVMMIADKIVKIGDVGKIENGSLVLYDEFLAIDRICPEPTLYCEIGITGEFIEGDVITIDSESLKVKRTGNPAVVEKIICRK

SEQ ID NO: 164 - protein, 290 aa, Methanococcus maripaludis
  >WP_011977398.1 Methanococcus maripaludis Adriase
SVVIGYYGKNGAVIAGDKRNLLFNGIESNREKLEEIMYSGQLRTDEELLKKASEFDVKIHINDTREKVKKFGNVLSGEVLSIGRESKRRRMYLTKEKCVILDIENDQITNKSVKNGSGIVVFGNRYIKNLVESEIKKHVQKILKMSAKEISALFEKILKNIENATLSNEFEYYFVETYENNLEKVIENDLNDLFNYRKELSLKMVEMQKVMMIADKIVKIGDVGEIENGNLVLYDEFLAIDKICPEPTIYCEIGITGEFAEGDIITIDNESLKVKRTGSPVVVEKIICRK

SEQ ID NO: 165 - protein, 290 aa, Methanococcus maripaludis
  >WP_104837987.1 Methanococcus maripaludis Adriase
SVVIGYYGKNGAVIAGDKRNLLFNGIESNREKLEEVLYSGEIKSDEELFKKASEFDVTVHINDTREKVKSLGNLLSGEVLSIGKDSKRRRMYLTKEKCAIIDIENDQITNKSVKTGSGIVVFGNRHIKHFVESEIKKHIQKLLKMNAREIRDLFEKILKKIENATLSDTFEYYFVEAGEPEFEKAVNDDLDDLFNYRHDLSIKMAEMQILTMIAEKIVKIGDVGIIKNGTLVLYDEFLAINKICPEPEIYSEIEIKGEFIEGDVITIDNESLKVKRTGNPVVVQKIICKK

SEQ ID NO: 166 - protein, 290 aa, Methanococcus maripaludis
  >WP_013998520.1 Methanococcus maripaludis Adriase
SVVIGYYGKNGAVIAGDKRNLLFNGIESNRAKLEKVLYSGEIKTDEELFKKASEFDVTVHINDTREKVKSLGNLLSGEVVSIGKDSKRRRMYLTKEKCAIIDIENDQITNKSVKTGSGIVVFGNRYIKHFVESEIKKHVQKLLKMSAREIRDLFEKILKNIENATLSDNFEYYVVEAGEPEFEKAVNKDLDDLFNYRHDLSIKMAEMQILTMIAEKIVKIGDVGVIKNGTLVLYDEFLAINKICPEPEIYSEIEITGEFIEGDIITIDNESLKVKRTGTPVVVQKIICKK

SEQ ID NO: 167 - protein, 290 aa, Methanococcus maripaludis
  >WP_011169965.1 Methanococcus maripaludis Adriase
SVVIGYYGKNGAVIAGDKRNLLFNGIESNRAKLEEVLYSGEIKNDEELFKKASEFEVTVHINDTREKVKSLGNLLSGEVVSIGKDSKRRRMYLTKEKCAIIDIENDQITNKSVKTGSGIVVFGNRYVKHFVESEIKKHVQKLLKMSAREIRDLFEKILKNIENATLSDTFEYYVVEAGEPEFEKAVNKDLDDLFNYRHDLSIKMAEMQILTMIAEKIVKIGDVGVIKNGTLVLYDEFLAINKICPEPEIYSEIEITGEFIEGDIITIDNESLKVKRTGSPVAVQKIICKK

SEQ ID NO: 168 - protein, 290 aa, Methanococcus maripaludis
  >WP_119720453.1 Methanococcus maripaludis Adriase
SVVIGYYGKNGAVIAGDKRNLLFNGIESNRAKLEEVLYSGEIKTDEELFKKASEFDVTVHINDTREKVKSLGNLLSGEVVSIGKDSKRRRMYLTKEKCAIIDIENDRITNKSVKTGSGIVVFGNRYIKHFVESEIKKHVQKLLKMSAREIRDLFEKILKNIENATLSDTFEYYVVETGEPEFEKAVNKDLDDLFNYRHDLSIKMAEMQILTMIAEKIVKIGDVGVIKNGTLVLYDEFLAINKICPEPEIYSEIEITGEFIEGDIITIDNESLKVKRTGSPVAVQKIICKK

SEQ ID NO: 169 - protein, 290 aa, Methanococcus maripaludis KA1
  >BAP60138.1 Methanococcus maripaludis KA1 Adriase
SVVIGYYGKNGAVIAGDKRNLLFNGIESNRAKLEKVLYSGEIKTDEELFKKASEFDVTVHINDTREKVKSLGNLLSGEVVSIGKDSKRRRMYLTKEKCAIIDIENDRITNKSVKTGSGIVVFGNRYIKHFVESEIKKHVQKLLKMSAREIRDLFEKILKNIENATLSDTFEYYVVETGEPEFEKAVNKDLDDLFNYRHDLSIKMAEMQILTMIAEKIVKIGDVGVIKNGTLVLYDEFLAINKICPEPEIYSEIEITGEFIEGDIITIDNESLKVKRTGSPVAVQKIICKK

SEQ ID NO: 170 - protein, 309 aa, Methanothermus fervidus
  >WP_013413908.1 Methanothermus fervidus Adriase
SLILAYVGKKGCVIAGDKRKIAYFGDKSSRKILEEKLYTGKIKTLDELFEEAKKLGVSINITDNAKKVREKGHVAIGEVGIKATHSAKRRRLYATTNCYEIIELEGSKIVKRKKGNSALIVFGNRITKKISNEILKKEFNPKMSLQEIANLFKKIIKKASELTPTINKSCDIVIKNPILNKEMAEKILEMSISEDIKNLRKWRKSLKDKMIKAAKEITLASKIITEGDVGEIVDIKDGKIMVKLNQDVCAYDLNWEKVANPGEIVTMTADNPSEIKVGDKVVIENEELYVERCKEPLQCEVILTYCNRG

SEQ ID NO: 171 - protein, 318 aa, Methanobrevibacter curvatus
  >WP_067092528.1 Methanobrevibacter curvatus Adriase
SLIIAYVGKKGCVMVADKRRISYFGDKEDIESLEDKLYSGDLENDEELKKTANLLNVSLKISDKESKIRSLESSLVAEVSTKSTHKAMRKRIYATTNAYQIIELEGSNISNLDKGDSSIIIFGNKITKSLANDFLSKEFKADVSLKYMGDIFTRILSKIHLKTPSIGNEFDVLVKTPKFSKEEAQKYLDDLVKVDIKLLVKFRDKLTQDLFDKSEEIKIASKIINEGYIGVVSKIKNNFIYVKLNYNVQAYNTRWKLLVKPNEEALMFLGEDSIKTHNSNNTQENIVKLGDKILIENEIIVIERNKTPLNCDIILTSV

SEQ ID NO: 172 - protein, 307 aa, Methanobrevibacter olleyae
  >WP_067146985.1 Methanobrevibacter olleyae Adriase
SLIIAYVGNKGCVMVGDKRRIAYFGSKEERELLEQEIYSGDISSDEDLYARAEELEISLKISDDACKVKSLENVAVGEVSSRGAMETKRKRIYGTTNGFQIVELTGSEIVNVKRGESSIIVFGNKITKSLANDMLKNKWKPSFSLKYMGEIFGQIIEDISTKTPSLGTKYDVVIQQNNLSKTKVQDYLDEVIERDINLLAKFRNKLKEDLLKQNETIKLASTIIDEGPIGIVDSIDENLIQVKLNPDVRAFDINWKLLAKPGENVIMFVEGEDAVSLKDQVVIENEALCIKGNKANLKCDIILCHLE

SEQ ID NO: 173 - protein, 307 aa, Methanobrevibacter ruminantium
  >WP_012956362.1 Methanobrevibacter ruminantium Adriase
SLIIAYVGKKGCVMAADKRRIAYFGLKEQREILEQEIYSGEIHNDEELYARAEELDVNLKVTDNACKVKSIENVAIGEVSSRGTMETKRKRIYGTSNGFKIIELSGSHVLNSKRGVSSIIVFGNKVTKSLANKMIQERWKPSFSLKYMGEIFGEILKDIAEITPSVGKDYDVIIEKNNLAKSQVQDYIDEVAERDVKVLAKFRAQLREQLMEQNENIKLASTIIEEGSVGEIVIIDDTLIEVKLNPDVRAFDVNWKVLAGPGENVLMVVDDSEGLDKGDEIVIEDEVLCVKKNKANLKCDIILCHLE

SEQ ID NO: 174 - protein, 319 aa, Methanobrevibacter sp. AbM4
  >WP_016358763.1 Methanobrevibacter sp. AbM4 Adriase
SIIIAYIGRKGCVMASDKRRIAYFGDKDNREKLEEELYSGNIRNDEELYKEAAKLGIDLKISDDAKKIKSIGNAVMGEVSSKTTREVRRRRIYGTTNGYQIIELIGSELKNKETGSSGIIIFGNKIAKQMANSLIKQRWKSSISLKYTGDIFEEIIKEIAEKTPSVGKNVDVIIGKDSKLTKTTAQKYLDETETRDIKVLEKYRQKLAEDLEEQRESIEVANKIINKGTIGYISKIEGKMLNVKLTDKVNAYDTNLKKVAGSNEEVIMFLDKDTEGNEIKEADVSSYAKVNDKVVIKNENLCIDKNNIPLNCGIILCNE

SEQ ID NO: 175 - protein, 319 aa, Methanobrevibacter boviskoreani
  >WP_040681637.1 Methanobrevibacter boviskoreani Adriase
SIIIAYIGRKGCVMASDKRRIAYFGDKDNREKLEEELYSGNIRNDEELYKEAAKLGIDLKISDDAKKIKSIGNAVMGEVSSKTTREVRRRRIYGTTNGYQIIELIGSELKNKETGSSGIIIFGNKIAKQMANSLIKQRWKSSISLKYTGDIFEEIIKEIAEKTPSVGKNIDVIIGKDSKLTKTTAQKYLDETETRDIKVLEKYRQKLAEDLEEQRESIEVANKIINKGTIGYISKIEGKMLNVKLTDKVNAYDTNLKKVAGSNEEVIMFLDKDTEGNEIKEADVSSYAKVNDKVVIKNENLCIDKNNIPLNCGIILCNE

SEQ ID NO: 176 - protein, 319 aa, Methanobrevibacter wolinii
  >WP_042707893.1 Methanobrevibacter wolinii Adriase
SVIIAYIGKKGCVMASDKRRIAYFGDKDEREKLEEDLYTGKIRNDEELYNEAKKRQITLKISDDVNKIKKIENALMGEVSTKTTMEIRRKRIYGTTNGYQIVELLGSETQNKERGSSGIIIFGNKIAKSMANSLIKERWKSSLSLKYIGDIFEEVIKEIASKTPSVGKNVDVLYSKDNTLNKTSAQEYLDKTEERDNKLLEKYRQKLTEDLIKQQKSVELAGKIVTKGDVGFVESNEGKILKVKLAKDVQAFDMDWKVLAKPGEEIIMFLDKDNNGNEIKDTEVSNYVQKFDKVVIKDENLCLEKNNIKLNCNIILCNT

SEQ ID NO: 177 - protein, 319 aa, Methanobrevibacter sp. 87.7
  >WP_088539534.1 Methanobrevibacter sp. 87.7 Adriase
SVIIAYIGKKGCVMASDKRRIAYFGDKEEREKLEEDLYSGKIRNDEELYNEAAKRQITLKISDDVNKIKKIETVLMGEVSTKTTMEIRRKRIYGTSNGYQIVELLGSEVQNKERGNSGIIIFGNKIAKSIANSLIKERWKSNLSLKYIGDIFEDIIKEIASKTPSVGKNVEVLYTKNNNLNKVTAQEYLDKTEEIDNKLLEKYRQKLSEELLSQQKSIEFASKIITKGDVGFVNSYEGKILKIKLADNVQAFDMDWKVLAKPGEEIIMFIDKDNNGNEIKDIEVSNYVQKFDKVVVKDENLCLDKNNIKLNCDIILCNT

SEQ ID NO: 178 - protein, 306 aa, Methanobrevibacter filiformis
  >WP_066972212.1 Methanobrevibacter filiformis Adriase
SLIIAYVGKKGCVIASDKRKIAYFGDKENIDKLEKELYNGNIKGDDDLYDTASKLDVSLKISEDGIKLRSFDKINVGEVSSKSTTETNRKRIYGTTNGYQIVELSGSKIVHTEKGNNALIIFGNKRTKTLANDLISKKWKSNFSLKYMGDIFLRILEEISAKTPSIGKAYDLNIINHKFTKEEANEYLDYFIEKDIQVLGKFRNQLKSELLEQSEAIQMATKIINQGFVGKIANIENNMLEVQLNKNVQGFDHNWKLLVKPGEKAFMFAPENIDVKIGDKIVIQNETLCVEQNNVQLSCNIILCHL

SEQ ID NO: 179 - protein, 305 aa, Methanobrevibacter smithii
  >WP_019266968.1 Methanobrevibacter smithii Adriase
SLIIAYIGKKGCVMASDKRRIGYFGNKEQLNALESELYSGKIKNDDEFKKKADEYGIAIKLTEDATKITTVGNCVRGEVTTKKAFETYRKRIYGTTMGYQIVELSGSETVSREAGEKAIIVFGNKFAKQEAEKLINKKWKPSLSLKYMGDIFEEILTEISRKTPTIGNEFDVLIKQPKFNKSEAQRHLNVSIDKDIKVLSKFRQKLQEDLIQKNKEIALADKIIDKGDIGEVVSVDGKMLHVKLNSKTQAFDGNWKQIAKPNETVFMFSDNGDAELGDKVVIQNEKLCLKKDKSNLKCDIILCGL

SEQ ID NO: 180 - protein, 305 aa, Methanobrevibacter smithii
  >WP_019262821.1 Methanobrevibacter smithii Adriase
SLIIAYIGKKGCVMASDKRRIGYFGNKEQLNALESELYSGKIKTDEEFKKKADEYGISIKLTEDATKITTVGNCVRGEVTTKKVFETYRKRIYGTTMGYQIVELSGSETVSREAGEKAIIVFGNKFAKQEAEKLINKKWKPSLSLKYMGDIFEEILTEISRKTPTIGNTFDVLIKQPKFNKSEAQRHLNVSIDKDIKVLSKFRQKLQEDLIQKNKEIALADKIINKGDVGEVVSVDGKMLHVKLNSKTQAFDGNWKQIAKPNETVFMFSDHNHVELGDKVVIQDEKLCLKKDKSNLKCNIILCSL

SEQ ID NO: 181 - protein, 305 aa, Methanobrevibacter
  >WP_004035387.1 Methanobrevibacter Adriase
SLIIAYIGKKGCVMASDKRRIGYFGNKEQLNALESELYSGKIKTDEEFKKKADEYGISIKLTEDATKITTVGNCVRGEVTTKKVFETYRKRIYGTTMGYQIVELSGSETVSREAGEKAIIVFGNKFAKQEAEKLINKKWKPSLSLKYMGDIFEEILTEISRKTPTIGNTFDVLIKQPKFNKSEAQRHLNVSIDKDIKVLSKFRQKLQEDLIQKNKEIALADKIINKGDVGEVVSVDGKMLHVKLNSKTQAFDGNWKQIAKPNETVFMFSDHNHVELGDKVVIQDEKLCLKKDKSNLKCDIILCSL

SEQ ID NO: 182 - protein, 305 aa, Methanobrevibacter smithii
  >WP_004033346.1 Methanobrevibacter smithii Adriase
SLIIAYIGKKGCVMVSDKRRIGYFGNKEQLNALESELYSGKIKTDEEFKKKADEYGISIKLTEDATKITTVGNCVRGEVTTKKVFETYRKRIYGTTMGYQIVELSGSETVSREAGEKAIIVFGNKFAKQEAEKLINKKWKPSLSLKYMGDIFEEILTEISRKTPTIGNTFDVLIKQPKFNKSEAQRHLNVSIDKDIKVLSKFRQKLQEDLIQKNKEIALADKIINKGDVGEVVSVDGKMLHVKLNSKTQAFDGNWKQIAKPNETVFMFSDHNHVELGDKVVIQDEKLCLKKDKSNLKCDIILCSL

SEQ ID NO: 183 - protein, 305 aa, Methanobrevibacter sp. NOE
  >RBQ22740.1 Methanobrevibacter sp. NOE Adriase
SLIIAYVGKKGCVMASDKRRIAYFGEKDNREELEEELYSGSIANDDDLKKRSAELDITLKISDDANKIRYIEDVIVGEVSSRSTHETRRKRIYGTSNGYQLIEMLGSEITHSEKGESAIILFGNKVSKSLANDLISKKWKPRLSLKYMGEIFEDVLSEVSSKTPSLGKKYDVMIVQPKFNEKKAQSYLDETIKRDVQLLGKWREKLKNDLLEQNETIQLASKIIDEGDIGLVSSADGSILQVTLNDDVQAYDTNWKQLAKPGELVVMISDEKEVEVGDEIVIENETLCIKRNKANLKCDIILCDL

SEQ ID NO: 184 - protein, 305 aa, Methanobrevibacter arboriphilus
  >WP_042704220.1 Methanobrevibacter arboriphilus Adriase
SLIIAYVGKKGCVMASDKRRIAYFGDKENREKLEEEIYSGAIKNDEDLKKRSDELDITLKISDDANKIRYIENVIVGEVSSRTTFETRRKRIYGTTYGYQIIEMLGSDITHSEKGENAIILFGNKISKAMANDLISKKWKSSFSLKYMGEIFESVLEEVASKTPSLGKKCDVMIVHPELDKKSSQKYLDETIKRDVQLLGKWREKLKNDLLEQNETVQLAAKIINEGDIGLVSNTDGPILQVTLNKDVKAYDTNWKQLAKPGEVVVMISNQGDVEIGDEVVIENEILCIKRNKSSLKCDIILCDI

SEQ ID NO: 185 - protein, 305 aa, Methanobrevibacter arboriphilus
  >WP_080459963.1 Methanobrevibacter arboriphilus Adriase
SLIIAYVGKKGCVMASDKRRIAYFGDKENREKLEEEIYSGSIKNDEDLKKRSDELNITLKISDDANKIRYIENVIVGEVSSRTTFETRRKRIYGTTYGYQIIEMLGSDITHSEKGENAIILFGNKISKAMANDLISKKWKSSFSLKYMGEIFESVLEEVASKTPSLGKKCDVMIVHPELDKKSSQEYLDETIRRDVQLLGKWREKLKSDLLEQNETIQLATKIINEGDIGVVSTTDGPILQVTLNKDVQAYDTNWKQLAKPGEIVVMISNPGDVEIGDEVVIENEILCIKRNKSHLKCDIILCDT

SEQ ID NO: 186 - protein, 305 aa, Methanobrevibacter woesei
  >WP_116669733.1 Methanobrevibacter woesei Adriase
SLIIAYVGKKGCVMASDKRKIAYFGNKENLEALESELYNGEIATDEELYKRAKDFDISIKISDDGNKIDTVGNTVMGEVASKGAFETKRRRIYGTTNGYQIIEIIGSEIVSRSAGEKAIIIFGNNFAKKEAEALISKKWKSTLSLKYMGDIFKEIINEVSQKTPTLGDKFDVLIQQPKFTADEAQKYLNETIDQDVKVLAKIRQKLQEDLIEKSREIELASKIINEGDIGEVSSIEGNMLQVTLNDKTQAFDNNWRQLAKPKGKVIMFCETDDVKIGDKVVIENENLCLEKNKSNLSCNIILCNL

SEQ ID NO: 187 - protein, 303 aa, Methanobrevibacter millerae
  >WP_058739601.1 Methanobrevibacter millerae Adriase
SLIIAYVGKKGCVMASDKRRIAYFGNNRQALEDELYDGSITTDEELYQRSKELDVPIKISDDADKIRVVGNTVRGEVSTKGTHETKRKRIYGTTNGYQIVELIGSETKSRQAGEKGIILFGNDFAKKQAETLIQRRWKASHSLRLMGDIFEEILSDIAQKTPTIGKEFDVLIQQPKFTASEAQKHLNITIDADIKVLTKYRQQLTEEMIQKTREIELANKIIDDGPIGKVESIDGKMVEVKLNDKTQAFNFNWKPLAGPNGNVIMFADTDDIKIGDKVIIKDEVLCLKKNSSPLSCNIILCSL

SEQ ID NO: 188 - protein, 305 aa, Methanobrevibacter oralis
  >WP_042694031.1 Methanobrevibacter oralis Adriase
SLIIAYIGKKGCVMASDKRKIGYFGNKENLEILENELYNAVIRDDDEFLKRAEELGISIKITDDANKISIVENTIRGEVSTKGTFETKRKRIYGTTNGYQIVELLGSEVSSRQAGKSGIIIFGNKFAKQKAETLINRYWKSSQSLKYMGEIFGNILEEISKKTPSIGSQFDILVKSPNFDEMKAQKHLDVTIDHDIKVLTKFRQKLTEELIQQNLAIEMANKIIDKGEIGKVVSIEDNMIQVELNDKTQAMNGDWKQLAAPGEKVLMFSTSDDIKLGDKVIIDNEILCLKKNKSPLSCDIILCSL

SEQ ID NO: 189 - protein, 305 aa, Methanobrevibacter
  >WP_069573863.1 Methanobrevibacter Adriase
SLIIAYIGKKGCVMAADKRRIGYFGDKKNLDLLEEELYEGSIGNDEEFLARASELGISIKITDDANKLKTVGNCIRGEVSTKGTLETKRRRIYGTTNGYQIIELLGSDTKSRNAGENGIVIFGNNFAKQLAHNLISKKLKGSKSLRYMGEVFEDILKEVSSKTPTVGKNIDVLMQQPDFNKTEAQKHLNLTIDHDIKVLTKFRQELTEQIVQQSIEIEMANKIINKGSVGHVVNVDGNMLFIQLNDKTQAMDGNWKQLAAPGQNVLMFSESSNVEIGDEVVIENEELCLKKDKSSLKCDIILCSL

SEQ ID NO: 190 - protein, 305 aa, Methanobrevibacter thaueri
  >WP_116591264.1 Methanobrevibacter thaueri Adriase
SLIIAYVGKKGCVMASDKRKIGYFGDKENLKKLEDELYSGKITADEDFLKRAKELGISIKITDDASKLKIIGNTIRGEVSTKGTFETRRRRIYGTTSGYQIIELLGSDTQSRKAGKNGVIIFGNDYAKRMAETFIKREWKSSQSLRYIGEIFQGIIEDVASKTPTVGKNVDVMIQHPEFNEREAQKHLDITIDHDIKVLTKFRQELTEQIVQQQIEIDMVNKIMNEGTVGKVVNIDDNMLFVQLDKKVQAVDENWKQLAGPGQNVLMFTESDNVKIGDKVVIENEDLCLKKDKSSLKCDVILCSL

SEQ ID NO: 191 - protein, 305 aa, Methanobrevibacter sp. YE315
  >WP_067043438.1 Methanobrevibacter sp. YE315 Adriase
SLIIAYIGKKGCVMASDKRKIGYFGDKQNLKTLEEELYSGAIDNDEDFLNRASELGISIKITDDANKLKVVGNTIRGEVSTKGTFETRRRRIYGTTNGYQIIELLGSETESRKAGEKGIVIFGNVYAKQLAEPLIKRKVKASQSLRYMGEVFESILAEVASKTPTVGDKFDVLMQQPVFSVSEAQKHLNITIDNDIKVLTKFRQELTEQLVQQSLAIDMASKIISKGDVGRVVSIDGNMLHVQLNDKTQAMDGNWKQLAAPGQNVLMFTESDNVKIGDKVVIENEDLCLKKDKSSLKCDIILCSL

SEQ ID NO: 192 - protein, 315 aa, Methanobacterium sp. SMA27
  >WP_048190775.1 Methanobacterium sp. SMA27 Adriase
SLIITYIGSKGCVMAGDKRRIGFFGPEGPRENLEEKLYSGSINTKEELLKKADELGINIKISDDADKIHEIGDVVVGEVRSKTVYETKRKRIYATTGAYNIIELLGSDLKTVKSGGSSIIVFGNKYTKELAEKTIKRYWKSKLNLVTIRKIFESVMEEVAIETPTVSPEYDVMMKYPSIDTKEAKELLRVTILQDVKDLEEYRTQLKENLIQTSQNIQMATKIVIQGAIGNVAYVKGNEIGIILDKSIEALDTDWNTIAKPSELIEMTAQDGSKVSRGDLAVIENENLCINRTKEPLNCDFILCRADPDNKENIK

SEQ ID NO: 193 - protein, 308 aa, Methanobacterium lacus
  >WP_013644693.1 Methanobacterium lacus Adriase
SLIVTYIGSKGCIMAGDKRRIGFYGSPEARETLEDELYAGKIKTEEDLIKKAEEQGINLKISDDTTKIREMDNVLVGEVISRATHETKRKRIYAISGAYSMVELTGSNIDTVKSGGRSIIVYGNKYTQELAEKTIKKYWKPKMKFVDVERIMELVMSEVSENTPSVSKSFDLMIKYNSMDQKLAKEVIRTTVLEDVKNLEAFRNQLREENIKATKNIQMATKIVIEGNIGTVTRVNGNDVEIILDQTVEALDFNWEPVAKPAERVILTSENPQNVVMGDLAVIENENLCIKRTKESLNCGFILCRSDD

SEQ ID NO: 194 - protein, 307 aa, Methanobacterium sp. PtaB.Bin024
  >OPX57417.1 Methanobacterium sp. PtaB.Bin024 Adriase
SLIITYIGSKGCVMAGDKRSIGFLGDKNQREILEEELYSGKIKTKDQLTKRAHQLDINLKITDESEKVRKLDKVLVGEVKIRATHETRRKRIYATTNGYHQVELVGSEIKNVKSGKSSIVIFGNKLTKEITGKRLKKHWKSKISLNEVGEIFQKVMEDVAQVTPSVSPQYDLSIIHPQMDHKQAMELLRTTIISDVKELEKWREQLREDMLSKRQDIQMASRIITQGEIGRVKKAEGEKVEVILSEGVEALNMDWNVLAKSGDTIVMKAEQPSPLNLGDLVVIEEENLCIKKNKTPLSCDIILCKSE

SEQ ID NO: 195 - protein, 307 aa, Methanobacteriales archaeon HGWMethanobacteriales2
  >PKL73782.1 Methanobacteriales archaeon HGWMethanobacteriales2 Adriase
SLIMTYIGSKGCVMAADKRSIGFLGDKNQRELLEEDLYSGKIDSDEKLLKRAKELDINLKISDQGEKIRNLGKVLVGEVKIRATHETKRKRIYATTNGYHQVELTGSEIQNVKSGQSSIVIFGNKITKEIAGKSLKKHFKSKISLNEVGKIFQKVMEDVAEATPSVSSEHDIFIIHPQMDHKQAMELLRTTIISDVKELEKWRNKLKEDMLAQRRDIQMASRIITQGEVGRVKKVEGDVVEVILSDGVEALNMDWNVLAKPGDTIFMKIEKPSPLNLGDLVVIEDENLCIKKNKTSLSCDIILCKAD

SEQ ID NO: 196 - protein, 307 aa, Methanobacterium
  >WP_100906514.1 Methanobacterium Adriase
SLIMTYIGSKGCVMAADKRSIGFLGDKNQRELLEEDLYSGKIDSDEKLLKRARELDINLKISDQGEKIRNLGKVLVGEVKIRATHETKRKRIYTTTNGYHQVELTGSEIQNVKSGQSSIVIFGNKITKEIAGKSLKKHFKSKISLNEVGKIFQKVMEDVAEATPSVSSEHDIFIIHPQMDHKQAMELLRTTIISDVKELEKWRNKLKEDMLAQRRDIQMASRIITQGEVGRVKKVEGDVVEVILSDGVEALNMDWNVLAKPGDTIFMKIENPSPLNLGDLVVIEDENLCIKKNKTSLSCDIILCKTD

SEQ ID NO: 197 - protein, 308 aa, Methanobacterium sp. MB1
  >WP_039376705.1 Methanobacterium sp. MB1 Adriase
SLIITYVGSKGCVMAGDKRSIGFLGDKEQREVLEEEMYSGKIKTTEELLQRAEQLDINLKITDDVEKVRKIGDVLVGEVKLRTTTETKRKRIYGTSGGYHEVELSGSQIKNAKSGQSSIVVFGNKFTKEIANKHLQKYWKSQTSIKEIAKIFQRIMEDVAQSTPSVSPQFDIYTVHPQLNHKQAMEILRTTIVKDVKELEKWREELKTQMLNQRRDIQMAARILTQGEVGKVLKVEGDEVEVILSPGVEALDMQWNVLSREGETIVMKMEEPSSLNMGDLVVIENENLCVKKDKTPLSCDVILCRTDK

SEQ ID NO: 198 - protein, 308 aa, Methanobacterium sp. MB1; identical to SEQ ID NO: 197
  >CDG65302.1 Methanobacterium sp. MB1 Adriase

SEQ ID NO: 199 - protein, 308 aa, Methanobacterium formicicum
  >WP_048073463.1 Methanobacterium formicicum Adriase
SLIITYVGSKGCVMAGDKRSIGFLGDKEQREVLEEEMYRGKIKTTEELLQRAGQLDINLKITDSVEKVRNLGDVLVGEVKLRTTTETRRKRIYGTSSGYHQVELSGSEIKNVKSGQSSIVVFGNKLTKEITNKHLQKYWKSQTSLNEVSKIFQRIMEDVAQSTPSVSSQFDIYMVHPRLDHKQAMELLRTTIIEDVKELEKWREELKTQMLEQRRDIQMASRILTQGEVGRVRKVEGTEVEVILAPGVEALDMQWNVLSREGGTIVMKMDEPSPLSLGDLVVIEDENLCVKKSKTHLSCEIILCKSDK

SEQ ID NO: 200 - protein, 308 aa, Methanobacterium formicicum; identical to SEQ ID NO: 199
  >CEA14429.1 Methanobacterium formicicum Adriase

SEQ ID NO: 201 - protein, 308 aa, Methanobacterium formicicum
  >WP_048086016.1 Methanobacterium formicicum Adriase
SLIITYVGSKGCVMAGDKRSIGFLGDREQREVLEEEMYSGKIKTTEELLQRASQLDINLKITDSVEKVRNLGDVLVGEVKLRTTTETRRKRIYGTSSGYHQVELSGSEIKNVKSGQSSIVVFGNKLTKEIANKHLQKYWKSQTSLNEVSKIFQRIMEDVAQSTPSVSSQFDIYMVHPRLDHKQAMELLRTTIIKDVKELEKWREELKTQMLEQRRDIQMASRILTQGEVGRVRKVEGTEVEVILAPGVEALDMQWNVLSREGGTIVMKMDEPSPLSLGDLVVIEDENLCVKKSKTPLSCEIILCKSDK

SEQ ID NO: 202 - protein, 308 aa, Methanobacterium formicicum; identical to SEQ ID NO: 201
  >AIS32222.1 Methanobacterium formicicum Adriase

SEQ ID NO: 203 - protein, 308 aa, Methanobacterium formicicum
  >WP_060537561.1 Methanobacterium formicicum Adriase
SLIITYVGSKGCVMAGDKRSIGFLGDREQREVLEEEMYSGKIKTTEELLQRASQLDINLKITDSVEKVRNLGDVLVGEVKLRTTTETRRKRIYGTSSGYHQVELSGSEIKNVKSGQSSIVVFGNKLTKEIANKHLQKYWKSQTSLNEVSKIFQRIMEDVAQSTPSVSSQFDIYMVHPRLDHKQAMELLRTTIIEDVKELEKWREELKTQMLEQRRDIQMASRILTQGEVGRVRKVEGNEVEVILAPGVEALDMQWNVLSQEGETIVMKMNEPSPLSLGDLVVIEDENLCVKKSKTPLSCEIILCKSDK

SEQ ID NO: 204 - protein, 308 aa, Methanobacterium formicicum; identical to SEQ ID NO: 203
  >CEL24543.1 Methanobacterium formicicum Adriase

SEQ ID NO: 205 - protein, 308 aa, Methanobacterium sp. BAmetb5
  >AXV39335.1 Methanobacterium sp. BAmetb5 Adriase
SLIITYVGSKGCVMAGDKRSIGFLGDREQREVLEEEMYSGKIKTTEELLQRASQLDINLKITDSVEKVRNLGDVLVGEVKLRTTTETRRKRIYGTSSGYHQVELSGSEIKNVKSGQSSIVVFGNKLTKEIANKHLQKYWKSQTSLNEVSKIFQRIMEDVAQSTPSVSSQFDIYMVHPRLDHKQAMELLRTTIIEDVKELEKWREELKTQMLEQRRDIQMASRILTQGEVGRVRKVEGNEVEVILAPGVEALDMQWNVLSREGGTIVMKMDEPSPLSLGDLVVIEDENLCVKKSKTPLSCEIILCKSDK

SEQ ID NO: 206 - protein, 307 aa, Methanobacterium sp. Maddingley MBC34
  >EKQ53249.1 Methanobacterium sp. Maddingley MBC34 Adriase
SLIITYVGKKGCVMAGDKRSIGFLGDRKQRELLEEELYAGKIKTTEDLHKRAEQLDINLKITDNVEKVRNLGEVLVGEVKLRTTLETRRKRIYGTSSGYHQVELTGSEIRKVQSGQSSIVVFGNKITKEIANKHLKKYWKSKTSLDEVGKIFRRIMEDVAQATPSVSQQYDIFIIHPQLNHKQAMELLRTTIVGDVKELEKWREKLKQEMLEKTRDIQMASRILTQGEVGRVRKVEGDEVEVILSPGVEALNTRWDTLASEGETIIMKMETPTPLNLGDMVVIEDENLCIKKDKTSLSCDIILCKSS

SEQ ID NO: 207 - protein, 308 aa, Methanobacterium formicicum
  >WP_004031535.1 Methanobacterium formicicum Adriase
SLIITYVGSKGCVMAGDKRSIGFLGDKEQRELLEEEMYTGKIKTTEELHKRAKELEINLKITDNVEKVRNLGEVLVGEVKLRTTLETRRKRIYGTSSGYHQVELTGSEIKNVKSGQSSIVIFGNKITKEIANKHLKKHWKSKTSLNEVGKIFRNIMEDVAQLTPTVSSQYDIFTVHPQLDHKQAMELLRTTMIADVKQLQKWREDLKQEMLEKSRDIQMASRILTQGEVGRVRKTEGDEVEVILSPGVEALNTKWELLAGPGETITMKLSDHTSLNRGDLVIIEDENLCIKKDKTGLSCDIILCKSDQ

SEQ ID NO: 208 - protein, 308 aa, Methanobacterium sp. PtaU1.Bin097
  >OPY22699.1 Methanobacterium sp. PtaU1.Bin097 Adriase
SLIICYTGSNGSVIIGDKRRIGFFGNEKKRELLEEEFYSGSIKTQEALLKRAEELGITLKITDDAEKVREIGDVITGEVKTTTPFETKRKRIYATTGSYSLVELSGSTIKNMEGGTTSIVVFGNKYTKEIANKAIQDNWKKKVSLKDVGEIFEKAMDEVSRQTPSVSPNYDLIIKHPSLNKKQARELLRTTILQDVKELEKWREELKEQMIKAAKGIEMSNKILDNGVVGKVSKVEGHQVEIILAEGVEALDLEWNLQAEAGEVVAMEVDEPDKISIGDMAVIKDENLCIMPSQCGLKCEVILCKTDK

SEQ ID NO: 209 - protein, 309 aa, Methanobacterium sp.
  >TMS41273.1 Methanobacterium sp. Adriase
SLIICYTGSNGSVIIGDKRRIGFLGNEKKRKLLEEELYSLSIKSQDELLKRAAELEITLKISDDAEKVRELGDVVVGEVKNTTPFETKRKRIYATTGSYNLVELTGSSIEKMDGGTTSIVVFGNKSTKKIANQVIEENWKKKLSLKDVAGIFKKAMEEVSRQTPSVSQDYDIIVKNPELNKNQAREILRTTIIQDVKDLEKWRSQLKEQMIKAAKGIEMSNKIMDQGVVGKISKITGDQVEITLATGVEALDLEWNLQAEAGEVVTMEVDSPDKVSLGDMAVIKDENLCIMPSQCGLKCEVILCKADDR

SEQ ID NO: 210 - protein, 306 aa, Methanobacterium
  >WP_069583131.1 Methanobacterium Adriase
SLIMSYIGSNGCVMAGDKRRIGFFGDKEKREKLEEYLYSGAIQTDEELVKVAKEQEVTLKISDDARKIRSIADVVVGEVRFKTPFETKRKRIYGTTNGYIITELSGSDIKKVENGASSIVVFGNKVTKQMANEIIKKHWKSKASLENVESVFKKVMDEISGKTPSVSKDYDIIIKHSGMDKREAQKHLREILIKDVKELQKWREGLRQQLDTNAKSIQMASKIINEGEIGKVQSINGDKIGILLDKSVQALDMEWNVIAGPGGLIEMNTDDPSSVKIGDVAVIENENLCIRRTKCSLTCNVILCRS

SEQ ID NO: 211 - protein, 306 aa, Methanobacterium
  >WP_048080675.1 Methanobacterium Adriase
SLIMSYIGSNGCVMAGDKRRIGFFGDKEKREKLEEYLYSGAIQTDEELVKVAKEQEVTLKISDDARKIRSIDDVVVGEVRFKTPFETKRKRIYGTTNGYIITELSGSDIKKIENGASSIVVFGNKVTKQMANEIIKKHWKSKASLENVESVFKRVMDEISTKTPSVSKEYDIITKHSGLDKKEAQKHLREILIKDVKELQKWREGLRQQLDTNAKSIQMASKIINEGEIGKVQSINGDKIGILLDKSVQALDMEWNVIAGPGGLIEMNTDDPSSVKIGDVAVIENENLCIRRTKCSLTCNVILCRS

SEQ ID NO: 212 - protein, 308 aa, Methanobacterium sp. BRmetb2
  >AXV36996.1 Methanobacterium sp. BRmetb2 Adriase
SLIMTYIGSHGCVMIGDKRRIAFFGDKELIQKLEEELYSGKIKNDEELLERSKSLDVTIKVVDDAKKVRSLGDVVVGEVRFKTTFETRRKRIYATTNGYDIVELLGSKIDKIQKGESSIIVFGNKMTKKIANDTIRENWKPKTNLKDIGELFKVIMEEIALLTPSISKDYDFFVKSKNMNNNEAQKLLRETIVRDVKLLEKWRNKLKDDLLEKARSIEMAKKIIIEGQIGQVSGINDDNIEITLNNDIEALDIDWNVVAHTGEKVSMGINDPSQVKEGDLVVIEKENLCIKRTKSQLKCEVILCKADE

SEQ ID NO: 213 - protein, 306 aa, Methanothermobacter sp. MT2
  >BAW31310.1 Methanothermobacter sp. MT2 Adriase
SLIITYVSSKGCVIVGDKRKIAYFGDRENRKKLEKELYEGKIKNEKELRKRAEELGITLNIRDDAKKVRSIGDVVIGEVSLKTPFEAKRRRIYATTNAYQIVELVGSNITKLEKGESSIIIFGNKITKELTGKLLKKRWKKKTNLKEVSKLLEEVLEEVAKKTPTISQEHDKFIKTPRLDKRKAHKLLRETIVRDVKVLQKWRATLKMELIKKSEQIKMASKIIKEGEIGQVINIDEDKIEVKLSPKVEAYNIKWKKVAKPGENVLMIAEKPGKVKVGDLVVIEKENLQIKDKKIPLQCNVILCKI

SEQ ID NO: 214 - protein, 306 aa, Methanothermobacter tenebrarum
  >WP_112094313.1 Methanothermobacter tenebrarum Adriase
SLIITYTSSKGCVMIGDKRKIAYLGSPQKRRELERELYNGDIKTEEELRDRAEEFGIRLNIRDDARKVRSIGDVVVGEVSLKTPFEAKRRRIYATTGAYQIIELIGSNITKFEKGESSIVIFGNKITKKLASSLLKKYWKKKTSLKEVSKLLAKIVEEVAAKTPTISPEYDLYIKTPRLDKRKAHRILRETILRDVKTLQKWRAKLQKELLKKSEQIKMASKIIKEGEIGRVINIDNDKIEVKLAPNVQAFNIKWKKVAKPGENVLMLKEGPGEVKVGDIVVIEDENLQIKDKKIPLQCNVILCKT

SEQ ID NO: 215 - protein, 306 aa, Methanobacteriaceae archaeon 41_258
  >KUK01501.1 Methanobacteriaceae archaeon 41_258 Adriase
SLIITYISSKGCVIIGDKRKIAYLGSAQNRRELERELYNGNIKTEEELRSRAEQLGITLNITDDAKKVRSIGDVVVGEVSLKTPFEAKRRRIYATTGAYQIIELIGSNITKFEKGESSIVIFGNKITKKLASKLLKKHWKKKTSLEGISKLLKKILEDVATKTPTISREYDMYIKTPRLDKRKAHKLLRETILRDVKTLQKWRAKLQKELIKKSEQIKMASKIIKEGEIGRVINIDNDKIEVKLAPNVEAFNIKWKRVAKPGENVLMLKEKPGEVNVGDLVIIEDENLQVKDKKIPLQCNVILCKT

SEQ ID NO: 216 - protein, 308 aa, Methanobacterium paludis
  >WP_013825588.1 Methanobacterium paludis Adriase
SLIITYIGSKGCVMIADKRRIGFFGEEKTREKLEEELYSGAIKTDEELLKKASSLGITLKITDDAEKIREIGDIVVGEVRFKTPFETKRKRIYGTTGAYNVVELLGSEIKRIKTGESSIVVFGNKVTKEIANKYIQNHWKKKTNLKDIGEIFKAAMEEVAAKTPSVSQKYDLFIKHADIDKKEAKELLRTTIITDVKDLKKWREDLTDEMVKTAQTINVVSKIIDHGEVGKVTDVQGNEVEVTLKKGVEALDLNFNLLAKSGDTIKMEIKDSSKVKIGDKAVVMDENLCIKRTKAGLNCTVMLCKSDK

SEQ ID NO: 217 - protein, 308 aa, Methanobacterium congolense
  >WP_071906792.1 Methanobacterium congolense Adriase
SLIITYVGSKGCVMAGDKRRIGFFGDEANREKLEEKLYSGEIRTDEELLKRASELEITLKITDDAEKVREIDDVAVGEVRFKTPFKTKRKRIYGTTGAYNIVELLGSDIKTIKGGESSIVVFGNKMTKEIANKTIKDNWKNKTSLQDIAKLFSKVMEDVARQTPSVSQEHDVIIKHPSMEYKEAKELLRTTIIQDVKDLTEWRNSLKEELLKTTETIQMATRIISEGEVGKITSISGDELEVTLKKGVEALDMEWKPLKKAGESVTMQLAEAGEVNVGDKVVVEKENLCIKRSKAGLTCSVIICREEK

SEQ ID NO: 218 - protein, 307 aa, Methanobacterium sp.
  >RJS49378.1 Methanobacterium sp. Adriase
SLIITYIGAQGCVMAGDKRRIAFFGDKSNREILEEELYSGKIENESQLKKRASELEITLKITDDAVKLRSLGKVVVGEVSSKSSFETKRRRIYATTNGFQIIELTGSNITKMDKGESSIIVFGNKFTKKTASKILKKYWKSKTTLKEIETIFQKVLHEVSEKTPSVGSSCDLFIKTPALDKKESQKILRETVVRDVKLLQKWRQKLKKDLLEKAEAINMASRILTQGEVGRVVNVDEDRLEIVLGKDVQAFDVNWKQLATPGDKVMMFFNGEGDIIEGDLVVIENERLCLKRNQSPLRCDIILCKSD

SEQ ID NO: 219 - protein, 307 aa, Methanobacteriales archaeon HGWMethanobacteriales1
  >PKL67848.1 Methanobacteriales archaeon HGWMethanobacteriales1 Adriase
SLIMSYIGSKGCVISADKRRIAYFGDKSNREQLEEELYAGAIINDKELQARALDLGITLKISDDVCKVRSVGEVVVGEVSVKSPFETKRRRIYGTTNGYQIVELSGSDIAKMEKGEISIVVFGNKKTKEVANEIIKKRWENKTSLKGIADIFKEVMVEVAKVSPSISSENDIFIKHPKLDKREAQKLLRETILRDVKLLKKWREKLQNDLLEKAESIKMAANILTEGEIGRVVSIDEDMLEIILGKNVRAFDTRWKPVAGSGEKILMYSDKPNDVLVGDVAVIENENLCLKRNNSALRCDVILCKTE

SEQ ID NO: 220 - protein, 308 aa, Methanothermobacter marburgensis
  >WP_013295962.1 Methanothermobacter marburgensis Adriase
SLIITYISTRGCVIAGDKRRIAYFGDKSKREKLEEELYSGKIKSDDELHRRASELGVSIKVTDDTAKVRSLGDVVVGEISQKTPFETKRRRIYATTGAYQIIDLTGSRITSMEKGETAIIVFGNKVAKELTNRFLKKRWKTKTTLKEVENLFRELMDYVSSRTPSVGSKYDIFMKSPSLDKRSAHKLLSDTIVRDVRLLQKWRAKLKQEMLDRREEMKLASRILTEGEVGRVISQDGNHVEVKLSDGVEAYDTRWKRVAGPGENVLMRLSDDVAVAAGEGVAVRNENLCVDGRDIKLECDVIICRTEE

SEQ ID NO: 221 - protein, 308 aa, Methanothermobacter wolfeii
  >WP_074359097.1 Methanothermobacter wolfeii Adriase
SLIVTYISTRGCVIIGDKRRIAYFGDRSAREKLEEELYSGRIKSDEELQRRASELGLNIKVTDDACKVRSIGDVVVGEISQKTPFETKRRRIYATTGAYQIIELTGSRITSMEKGDTAIIVFGNRIAKEITNGFLKKRWKTRTTLKEVSELLTELMEHVSSRTPSVGSKYDLFMKSPALDKKSAHRILSETIVRDVKVLQKWRAKLRQEMLERSEEIRLASRILTEGEVGRVTGQDGRHIEVKLSEGVEAYDTRWKHVAGAGEKVLMRIPGEGNVDVGDRVVVKDENLCVDGKDLSLECDVIICRKES

SEQ ID NO: 222 - protein, 308 aa, Methanothermobacter sp. CaT2
  >WP_048175474.1 Methanothermobacter sp. CaT2 Adriase
SLIITYISSKGCVIAGDKRRIAYFGDKSSREVLEEELYTGKIKSDEELQRRASELGVNIKVTDDTCKVRSLGDVVVGEISQKTPFETRRRRIYATTGAYQIIELTGSKITSMEKGDTAIIVFGNKIAKEITNRFLKKRWKTKTSLKDVADLFRELMDHVSSQTPSVGSEYDLFIKSPSLDKKSAHKLLSDTIVRDVRLLQKWRAKLKQEMLDRREEMKLASRILTEGEVGRVMRQDGSHVEVKLAGDVEAYDTRWKKVAGPGDMVLMRVADGGTISPGEKIAVRDENLCVEGRDIKVDCDVIICRREE

SEQ ID NO: 223 - protein, 308 aa, Methanothermobacter thermautotrophicus
  >WP_010876390.1 Methanothermobacter thermautotrophicus Adriase
SLIITYISSKGCVIAGDKRRIAYFGDKSSREVLEEELYTGKIKSDEELQRRASELGVNIKVTDDTCKVRSLGDVVVGEISQKTPFETRRRRIYATTGAYQIIELTGSRITSMEKGDTAIIVFGNKIAKEITNRFLKKRWKTKTSLKDVADLFRELMDHVSSQTPSVGSEYDLFIKSPSLDKKSAHRLLSDTIVRDVRLLQKWRAKLKQEMLDRREEIKLASRILTEGEVGRVMRQDGSHVEVKLAGDVEAYDTRWKKVAGPGDMVLMRISDGGTLSPGEKIAVRDENLCVEGRDIKVDCDVIICRREE

SEQ ID NO: 224 - protein, 308 aa, Methanothermobacter sp. EMTCatA1
  >BAZ98793.1 Methanothermobacter sp. EMTCatA1 Adriase
SLIITYISSKGCVIAGDKRRIAYFGDKSSREVLEEELYTGKIKSDEELQRRASELGVNIKVTDDTCKVRSLGDVVVGEISQKTPFETRRRRIYATTGAYQIIELTGSKITSMEKGDTAIIVFGNKIAKEITNRFLKKRWKTKTSLKDVADLFRELMDHVSSQTPSVGSEYDLFIKSPSLDKKSAHKLLSDTIVRDVRLLQKWRAKLKQEMLDRREEIKLASRILTEGEVGRVMRQDGRHVEVKLAGDVEAYDTRWKKVAGPGDMVLMRISDGGTLSPGEKIAVRDENLCVEGRDIKVDCDVIICRREE

SEQ ID NO: 225 - protein, 308 aa, Methanothermobacter defluvii
  >WP_115892198.1 Methanothermobacter defluvii Adriase
SLIITYISSKGCVIAGDKRRIAYFGDKSSREVLEEELYTGKIKSDEELQRRASELGVNIKVTDDTCKVRSLGDVVVGEISQKTPFETRRRRIYATTGAYQIIELTGSRITSMEKGDTAIIVFGNKIAKEITNRFLKKRWKTKTSLKDVADLFRELMDHVSSQTPSVGSEYDLFIKSPSLDKKSAHRLLSDTIVRDVRLLQKWRAKLKQEMLDRREEIKLASRILTEGEVGRVMRQDGRHVEVKLAGDVEAYDTRWKKVAGPGDMVLMRISDGGTLSPGEKIAVRDENLCVEGRDIKVDCDVIICRREE

SEQ ID NO: 226 - protein, 86 aa, Methanococcus voltae
  >WP_013180795.1 Methanococcus voltae OB
IKVQKLMLIEKKIATKGEIGYVNEGKLKLYDKYLAIDRICENPNLYYEIDITGDVKEGDIILIDENNLKVKNKDVIVSVNKIICNR

SEQ ID NO: 227 - protein, 86 aa, Methanococcus aeolicus
  >WP_011973890.1 Methanococcus aeolicus OB
IDIKKTMLIAEKIEINGEVGYIKNGKLVLDENHLAIDTICSNPNLYNEIEIKGEYEEGDIIYIDNGELKVKGKDSSVCVDKIICKA

SEQ ID NO: 228 - protein, 86 aa, Methanothermococcus thermolithotrophicus
  >WP_018153627.1 Methanothermococcus thermolithotrophicus OB
FEFGKIMTIVNKIANEGEIGTIKNGKLVLNDDHIAIDKVCPNPKLFTEIEVEGNFEDGDIVVIENGNMKIKGKNENITTKYIVCKK

SEQ ID NO: 229 - protein, 86 aa, Methanococcales archaeon HHB
  >GBF37010.1 Methanococcales archaeon HHB OB
IDFRKVLAIVDKIENNGEVGIIKDGKLVLNEDHLAIDKICPNPRQFREIEIEGDVEDGDIVVIENGTLKVKGKDAILKTNYIICRK

SEQ ID NO: 230 - protein, 86 aa, Methanococcales archaeon HHB; identical to SEQ ID NO: 229
  >WP_131007839.1 Methanococcales archaeon HHB OB

SEQ ID NO: 231 - protein, 86 aa, Methanothermococcus okinawensis
  >WP_013866916.1 Methanothermococcus okinawensis OB
IDFKKVMIIADKIENNGEVGIIKNGKLVLDDNHIAIDKVCPNPKLFNEIEIEGDVEDGDVVLIEDGSLKIKGKDIPLAINHIICKK

SEQ ID NO: 232 - protein, 86 aa, Methanotorris igneus
  >WP_013799607.1 Methanotorris igneus OB
IDFGKVMTIVNKIVKNGEIGVIKNGKLVLYDKYIAIDKICPNPKMFNEIEVKGDVEDGDVIVIENGEMKVKGKNTPVFVDYTICEK

SEQ ID NO: 233 - protein, 86 aa, Methanotorris formicicus
  >WP_007043881.1 Methanotorris formicicus OB
IDFSKVMTIVNKIVKNGEVGVVKNGKLVLYDKYIAIDKICPNPNIFNDIEIRGDVEEGDVVVIENGEMKIKGKNTPVFVDHIICEK

SEQ ID NO: 234 - protein, 86 aa, Methanocaldococcus infernus
  >WP_013100627.1 Methanocaldococcus infernus OB
VDFGKVMDIVNRIVKNGEIGEVKNGKLHLFDDYIAVDSIKPNPKTYKVIDIEGAEDGDIIVIENGEMKVKGKDKKVNTNYIIIKSW

SEQ ID NO: 235 - protein, 86 aa, Methanocaldococcus villosus
  >WP_004589885.1 Methanocaldococcus villosus OB
IDFGKVMSIVNKIVKNGEVGVIKEGKLHLYDQYIAIDKISPNFKTFRIIDVKGDVEDGDIVVIENGDMKIKNKGIKVMTDYIICYK

SEQ ID NO: 236 - protein, 86 aa, Methanocaldococcus vulcanius
  >WP_015733029.1 Methanocaldococcus vulcanius OB
IDFGKVMSIVNKIVKNGEIGVIKDGKLHLYDEYIAVDKIDPNPNTFKIIEVKGNFKDGDVIVIENGDMKVKGTDERVETDYIIISK

SEQ ID NO: 237 - protein, 85 aa, Methanocaldococcus fervens
  >WP_015791349.1 Methanocaldococcus fervens OB
IEFGKVMTIINKIVKNGEIGVIKDGKLHLYDNYIAIDKIDPPNVFKVVEVEGNFKDGDVVVIENGEMKIKGTNEKIMTKYIICHK

SEQ ID NO: 238 - protein, 86 aa, Methanocaldococcus sp. FS40622
  >WP_012979926.1 Methanocaldococcus sp. FS40622 OB
IDFGKVMSIVNKIVKNGEIGVIKDGKLHLYDNYIAIDKIDPNPKVFKVVEVEGNFKDGDIVVIENGDMKIKGTNEKLTTNYIIIHK

SEQ ID NO: 239 - protein, 86 aa, Methanocaldococcus jannaschii
  >WP_010870052.1 Methanocaldococcus jannaschii OB
IDFGKVMSIVNKIVKNGEIGVIKDGKLHLYDDYIAIDKIDPNPKVFKVVDVEGNFKDGDIVVIENGDMKIKGTNEKVTTKYIIIHK

SEQ ID NO: 240 - protein, 86 aa, Methanocaldococcus bathoardescens
  >WP_048201244.1 Methanocaldococcus bathoardescens OB
INFGKIMTIVNKIVKNGEIGVIKDGKLHLYDNYVAIDKIDPNPNVFKVVEVEGNFKDGDIIVIENGNMKIKGTDERVTTKYIICHK

SEQ ID NO: 241 - protein, 86 aa, Methanococcus vannielii
  >WP_012066013.1 Methanococcus vannielii OB
AEMQKLMTIVNKIAKSGEIGIIKNGSLVLNESFLAIDKICLNPEIYSEIDINGNFKEGDLIEIQNGELTVKGTNNYVSVQKIICNR

SEQ ID NO: 242 - protein, 86 aa, Methanococcus maripaludis
  >WP_011869407.1 Methanococcus maripaludis OB
VEMQKVMMIADKIVKIGDVGKIENGNLVLYDDFLAIDKICPEPTIYCEIEITGEFIEGDVITIDNESLKVKRTGNPVVVEKIICKK

SEQ ID NO: 243 - protein, 86 aa, Methanococcus maripaludis
  >WP_012193694.1 Methanococcus maripaludis OB
IEMQKVMMIADKIVKIGDVGKIENGSLVLYDEFLAIDRICPEPTLYCEIGITGEFIEGDVITIDSESLKVKRTGNPAVVEKIICRK

SEQ ID NO: 244 - protein, 86 aa, Methanococcus maripaludis
  >WP_011977398.1 Methanococcus maripaludis OB
VEMQKVMMIADKIVKIGDVGEIENGNLVLYDEFLAIDKICPEPTIYCEIGITGEFAEGDIITIDNESLKVKRTGSPVVVEKIICRK

SEQ ID NO: 245 - protein, 86 aa, Methanococcus maripaludis
  >WP_104837987.1 Methanococcus maripaludis OB
AEMQILTMIAEKIVKIGDVGIIKNGTLVLYDEFLAINKICPEPEIYSEIEIKGEFIEGDVITIDNESLKVKRTGNPVVVQKIICKK

SEQ ID NO: 246 - protein, 86 aa, Methanococcus maripaludis
  >WP_013998520.1 Methanococcus maripaludis OB
AEMQILTMIAEKIVKIGDVGVIKNGTLVLYDEFLAINKICPEPEIYSEIEITGEFIEGDIITIDNESLKVKRTGTPVVVQKIICKK

SEQ ID NO: 247 - protein, 86 aa, Methanococcus maripaludis
  >WP_011169965.1 Methanococcus maripaludis OB
AEMQILTMIAEKIVKIGDVGVIKNGTLVLYDEFLAINKICPEPEIYSEIEITGEFIEGDIITIDNESLKVKRTGSPVAVQKIICKK

SEQ ID NO: 248 - protein, 86 aa, Methanococcus maripaludis; identical to SEQ ID NO: 247
  >WP_119720453.1 Methanococcus maripaludis OB

SEQ ID NO: 249 - protein, 86 aa, Methanococcus maripaludis KA1; identical to SEQ ID NO: 247
  >BAP60138.1 Methanococcus maripaludis KA1 OB

SEQ ID NO: 250 - protein, 108 aa, Methanopyrus sp. KOL6
  >WP_088335494.1 Methanopyrus sp. KOL6 OB
LKHIREGYDILKEGVVGEVVEVGTEEEGEGVEDVPPERRIVVRLVEDVDARHMGDVVAGPGEEIVMAVEGDPEKVEPGDTVVVKDGIMKIDGKDLPVVTGYSICRTRR

SEQ ID NO: 251 - protein, 108 aa, Methanopyrus kandleri AV19
  >AAM01502.1 Methanopyrus kandleri AV19 OB
LKHIREGYDILKEGVVGEVVEVGTEEEGKGVEDVPPERRIVVRLAEDVDARHMGDVVAGPGEEIVMAVEGNPEEVEPGDRVVVKDGVMKIDGKDLPVITGYSICRTRR

SEQ ID NO: 252 - protein, 99 aa, Methanothermus fervidus
  >WP_013413908.1 Methanothermus fervidus OB
IKAAKEITLASKIITEGDVGEIVDIKDGKIMVKLNQDVCAYDLNWEKVANPGEIVTMTADNPSEIKVGDKVVIENEELYVERCKEPLQCEVILTYCNRG

SEQ ID NO: 253 - protein, 108 aa, Methanobrevibacter curvatus
  >WP_067092528.1 Methanobrevibacter curvatus OB
FDKSEEIKIASKIINEGYIGVVSKIKNNFIYVKLNYNVQAYNTRWKLLVKPNEEALMFLGEDSIKTHNSNNTQENIVKLGDKILIENEIIVIERNKTPLNCDIILTSV

SEQ ID NO: 254 - protein, 97 aa, Methanobrevibacter olleyae
  >WP_067146985.1 Methanobrevibacter olleyae OB
LKQNETIKLASTIIDEGPIGIVDSIDENLIQVKLNPDVRAFDINWKLLAKPGENVIMFVEGEDAVSLKDQVVIENEALCIKGNKANLKCDIILCHLE

SEQ ID NO: 255 - protein, 97 aa, Methanobrevibacter ruminantium
  >WP_012956362.1 Methanobrevibacter ruminantium OB
MEQNENIKLASTIIEEGSVGEIVIIDDTLIEVKLNPDVRAFDVNWKVLAGPGENVLMVVDDSEGLDKGDEIVIEDEVLCVKKNKANLKCDIILCHLE

SEQ ID NO: 256 - protein, 108 aa, Methanobrevibacter sp. AbM4
  >WP_016358763.1 Methanobrevibacter sp. AbM4 OB
EEQRESIEVANKIINKGTIGYISKIEGKMLNVKLTDKVNAYDTNLKKVAGSNEEVIMFLDKDTEGNEIKEADVSSYAKVNDKVVIKNENLCIDKNNIPLNCGIILCNE

SEQ ID NO: 257 - protein, 108 aa, Methanobrevibacter boviskoreani; identical to SEQ ID NO: 256
  >WP_040681637.1 Methanobrevibacter boviskoreani OB

SEQ ID NO: 258 - protein, 108 aa, Methanobrevibacter wolinii
  >WP_042707893.1 Methanobrevibacter wolinii OB
IKQQKSVELAGKIVTKGDVGFVESNEGKILKVKLAKDVQAFDMDWKVLAKPGEEIIMFLDKDNNGNEIKDTEVSNYVQKFDKVVIKDENLCLEKNNIKLNCNIILCNT

SEQ ID NO: 259 - protein, 108 aa, Methanobrevibacter sp. 87.7
  >WP_088539534.1 Methanobrevibacter sp. 87.7 OB
LSQQKSIEFASKIITKGDVGFVNSYEGKILKIKLADNVQAFDMDWKVLAKPGEEIIMFIDKDNNGNEIKDIEVSNYVQKFDKVVVKDENLCLDKNNIKLNCDIILCNT

SEQ ID NO: 260 - protein, 96 aa, Methanobrevibacter filiformis
  >WP_066972212.1 Methanobrevibacter filiformis OB
LEQSEAIQMATKIINQGFVGKIANIENNMLEVQLNKNVQGFDHNWKLLVKPGEKAFMFAPENIDVKIGDKIVIQNETLCVEQNNVQLSCNIILCHL

SEQ ID NO: 261 - protein, 95 aa, Methanobrevibacter smithii
  >WP_019266968.1 Methanobrevibacter smithii OB
IQKNKEIALADKIIDKGDIGEVVSVDGKMLHVKLNSKTQAFDGNWKQIAKPNETVFMFSDNGDAELGDKVVIQNEKLCLKKDKSNLKCDIILCGL

SEQ ID NO: 262 - protein, 95 aa, Methanobrevibacter smithii
  >WP_019262821.1 Methanobrevibacter smithii OB
IQKNKEIALADKIINKGDVGEVVSVDGKMLHVKLNSKTQAFDGNWKQIAKPNETVFMFSDHNHVELGDKVVIQDEKLCLKKDKSNLKCNIILCSL

SEQ ID NO: 263 - protein, 95 aa, Methanobrevibacter
  >WP_004035387.1 Methanobrevibacter OB
IQKNKEIALADKIINKGDVGEVVSVDGKMLHVKLNSKTQAFDGNWKQIAKPNETVFMFSDHNHVELGDKVVIQDEKLCLKKDKSNLKCDIILCSL

SEQ ID NO: 264 - protein, 95 aa, Methanobrevibacter smithii; identical to SEQ ID NO: 263
  >WP_004033346.1 Methanobrevibacter smithii OB

SEQ ID NO: 265 - protein, 95 aa, Methanobrevibacter sp. NOE
  >RBQ22740.1 Methanobrevibacter sp. NOE OB
LEQNETIQLASKIIDEGDIGLVSSADGSILQVTLNDDVQAYDTNWKQLAKPGELVVMISDEKEVEVGDEIVIENETLCIKRNKANLKCDIILCDL

SEQ ID NO: 266 - protein, 95 aa, Methanobrevibacter arboriphilus
  >WP_042704220.1 Methanobrevibacter arboriphilus OB
LEQNETVQLAAKIINEGDIGLVSNTDGPILQVTLNKDVKAYDTNWKQLAKPGEVVVMISNQGDVEIGDEVVIENEILCIKRNKSSLKCDIILCDI

SEQ ID NO: 267 - protein, 95 aa, Methanobrevibacter arboriphilus
  >WP_080459963.1 Methanobrevibacter arboriphilus OB
LEQNETIQLATKIINEGDIGVVSTTDGPILQVTLNKDVQAYDTNWKQLAKPGEIVVMISNPGDVEIGDEVVIENEILCIKRNKSHLKCDIILCDT

SEQ ID NO: 268 - protein, 95 aa, Methanobrevibacter woesei
  >WP_116669733.1 Methanobrevibacter woesei OB
IEKSREIELASKIINEGDIGEVSSIEGNMLQVTLNDKTQAFDNNWRQLAKPKGKVIMFCETDDVKIGDKVVIENENLCLEKNKSNLSCNIILCNL

SEQ ID NO: 269 - protein, 95 aa, Methanobrevibacter millerae
  >WP_058739601.1 Methanobrevibacter millerae OB
IQKTREIELANKIIDDGPIGKVESIDGKMVEVKLNDKTQAFNFNWKPLAGPNGNVIMFADTDDIKIGDKVIIKDEVLCLKKNSSPLSCNIILCSL

SEQ ID NO: 270 - protein, 95 aa, Methanobrevibacter oralis
  >WP_042694031.1 Methanobrevibacter oralis OB
IQQNLAIEMANKIIDKGEIGKVVSIEDNMIQVELNDKTQAMNGDWKQLAAPGEKVLMFSTSDDIKLGDKVIIDNEILCLKKNKSPLSCDIILCSL

SEQ ID NO: 271 - protein, 95 aa, Methanobrevibacter
  >WP_069573863.1 Methanobrevibacter OB
VQQSIEIEMANKIINKGSVGHVVNVDGNMLFIQLNDKTQAMDGNWKQLAAPGQNVLMFSESSNVEIGDEVVIENEELCLKKDKSSLKCDIILCSL

SEQ ID NO: 272 - protein, 95 aa, Methanobrevibacter thaueri
  >WP_116591264.1 Methanobrevibacter thaueri OB
VQQQIEIDMVNKIMNEGTVGKVVNIDDNMLFVQLDKKVQAVDENWKQLAGPGQNVLMFTESDNVKIGDKVVIENEDLCLKKDKSSLKCDVILCSL

SEQ ID NO: 273 - protein, 95 aa, Methanobrevibacter sp. YE315
  >WP_067043438.1 Methanobrevibacter sp. YE315 OB
VQQSLAIDMASKIISKGDVGRVVSIDGNMLHVQLNDKTQAMDGNWKQLAAPGQNVLMFTESDNVKIGDKVVIENEDLCLKKDKSSLKCDIILCSL

SEQ ID NO: 274 - protein, 105 aa, Methanobacterium sp. SMA27
  >WP_048190775.1 Methanobacterium sp. SMA27 OB
IQTSQNIQMATKIVIQGAIGNVAYVKGNEIGIILDKSIEALDTDWNTIAKPSELIEMTAQDGSKVSRGDLAVIENENLCINRTKEPLNCDFILCRADPDNKENIK

SEQ ID NO: 275 - protein, 98 aa, Methanobacterium lacus
  >WP_013644693.1 Methanobacterium lacus OB
IKATKNIQMATKIVIEGNIGTVTRVNGNDVEIILDQTVEALDFNWEPVAKPAERVILTSENPQNVVMGDLAVIENENLCIKRTKESLNCGFILCRSDD

SEQ ID NO: 276 - protein, 97 aa, Methanobacterium sp. PtaB.Bin024
  >OPX57417.1 Methanobacterium sp. PtaB.Bin024 OB
LSKRQDIQMASRIITQGEIGRVKKAEGEKVEVILSEGVEALNMDWNVLAKSGDTIVMKAEQPSPLNLGDLVVIEEENLCIKKNKTPLSCDIILCKSE

SEQ ID NO: 277 - protein, 97 aa, Methanobacteriales archaeon HGWMethanobacteriales2
  >PKL73782.1 Methanobacteriales archaeon HGWMethanobacteriales2 OB
LAQRRDIQMASRIITQGEVGRVKKVEGDVVEVILSDGVEALNMDWNVLAKPGDTIFMKIEKPSPLNLGDLVVIEDENLCIKKNKTSLSCDIILCKAD

SEQ ID NO: 278 - protein, 97 aa, Methanobacterium
  >WP_100906514.1 Methanobacterium OB
LAQRRDIQMASRIITQGEVGRVKKVEGDVVEVILSDGVEALNMDWNVLAKPGDTIFMKIENPSPLNLGDLVVIEDENLCIKKNKTSLSCDIILCKTD

SEQ ID NO: 279 - protein, 98 aa, Methanobacterium sp. MB1
  >WP_039376705.1 Methanobacterium sp. MB1 OB
LNQRRDIQMAARILTQGEVGKVLKVEGDEVEVILSPGVEALDMQWNVLSREGETIVMKMEEPSSLNMGDLVVIENENLCVKKDKTPLSCDVILCRTDK

SEQ ID NO: 280 - protein, 98 aa, Methanobacterium sp. MB1; identical to SEQ ID NO: 279
  >CDG65302.1 Methanobacterium sp. MB1 OB

SEQ ID NO: 281 - protein, 98 aa, Methanobacterium formicicum
  >WP_048073463.1 Methanobacterium formicicum OB
LEQRRDIQMASRILTQGEVGRVRKVEGTEVEVILAPGVEALDMQWNVLSREGGTIVMKMDEPSPLSLGDLVVIEDENLCVKKSKTHLSCEIILCKSDK

SEQ ID NO: 282 - protein, 98 aa, Methanobacterium formicicum; identical to SEQ ID NO: 281
  >CEA14429.1 Methanobacterium formicicum OB

SEQ ID NO: 283 - protein, 98 aa, Methanobacterium formicicum
  >WP_048086016.1 Methanobacterium formicicum OB
LEQRRDIQMASRILTQGEVGRVRKVEGTEVEVILAPGVEALDMQWNVLSREGGTIVMKMDEPSPLSLGDLVVIEDENLCVKKSKTPLSCEIILCKSDK

SEQ ID NO: 284 - protein, 98 aa, Methanobacterium formicicum; identical to SEQ ID NO: 283
  >AIS32222.1 Methanobacterium formicicum OB

SEQ ID NO: 285 - protein, 98 aa, Methanobacterium formicicum
  >WP_060537561.1 Methanobacterium formicicum OB
LEQRRDIQMASRILTQGEVGRVRKVEGNEVEVILAPGVEALDMQWNVLSQEGETIVMKMNEPSPLSLGDLVVIEDENLCVKKSKTPLSCEIILCKSDK

SEQ ID NO: 286 - protein, 98 aa, Methanobacterium formicicum; identical to SEQ ID NO: 285
  >CEL24543.1 Methanobacterium formicicum OB

SEQ ID NO: 287 - protein, 98 aa, Methanobacterium sp. BAmetb5
  >AXV39335.1 Methanobacterium sp. BAmetb5 OB
LEQRRDIQMASRILTQGEVGRVRKVEGNEVEVILAPGVEALDMQWNVLSREGGTIVMKMDEPSPLSLGDLVVIEDENLCVKKSKTPLSCEIILCKSDK

SEQ ID NO: 288 - protein, 97 aa, Methanobacterium sp. Maddingley MBC34
  >EKQ53249.1 Methanobacterium sp. Maddingley MBC34 OB
LEKTRDIQMASRILTQGEVGRVRKVEGDEVEVILSPGVEALNTRWDTLASEGETIIMKMETPTPLNLGDMVVIEDENLCIKKDKTSLSCDIILCKSS

SEQ ID NO: 289 - protein, 98 aa, Methanobacterium formicicum
  >WP_004031535.1 Methanobacterium formicicum OB
LEKSRDIQMASRILTQGEVGRVRKTEGDEVEVILSPGVEALNTKWELLAGPGETITMKLSDHTSLNRGDLVIIEDENLCIKKDKTGLSCDIILCKSDQ

SEQ ID NO: 290 - protein, 98 aa, Methanobacterium sp. PtaU1.Bin097
  >OPY22699.1 Methanobacterium sp. PtaU1.Bin097 OB
IKAAKGIEMSNKILDNGVVGKVSKVEGHQVEIILAEGVEALDLEWNLQAEAGEVVAMEVDEPDKISIGDMAVIKDENLCIMPSQCGLKCEVILCKTDK

SEQ ID NO: 291 - protein, 99 aa, Methanobacterium sp.
  >TMS41273.1 Methanobacterium sp. OB
IKAAKGIEMSNKIMDQGVVGKISKITGDQVEITLATGVEALDLEWNLQAEAGEVVTMEVDSPDKVSLGDMAVIKDENLCIMPSQCGLKCEVILCKADDR

SEQ ID NO: 292 - protein, 96 aa, Methanobacterium
  >WP_069583131.1 Methanobacterium OB
DTNAKSIQMASKIINEGEIGKVQSINGDKIGILLDKSVQALDMEWNVIAGPGGLIEMNTDDPSSVKIGDVAVIENENLCIRRTKCSLTCNVILCRS

SEQ ID NO: 293 - protein, 96 aa, Methanobacterium; identical to SEQ ID NO: 292
  >WP_048080675.1 Methanobacterium OB

SEQ ID NO: 294 - protein, 98 aa, Methanobacterium sp. BRmetb2
  >AXV36996.1 Methanobacterium sp. BRmetb2 OB
LEKARSIEMAKKIIIEGQIGQVSGINDDNIEITLNNDIEALDIDWNVVAHTGEKVSMGINDPSQVKEGDLVVIEKENLCIKRTKSQLKCEVILCKADE

SEQ ID NO: 295 - protein, 96 aa, Methanothermobacter sp. MT2
  >BAW31310.1 Methanothermobacter sp. MT2 OB
IKKSEQIKMASKIIKEGEIGQVINIDEDKIEVKLSPKVEAYNIKWKKVAKPGENVLMIAEKPGKVKVGDLVVIEKENLQIKDKKIPLQCNVILCKI

SEQ ID NO: 296 - protein, 96 aa, Methanothermobacter tenebrarum
  >WP_112094313.1 Methanothermobacter tenebrarum OB
LKKSEQIKMASKIIKEGEIGRVINIDNDKIEVKLAPNVQAFNIKWKKVAKPGENVLMLKEGPGEVKVGDIVVIEDENLQIKDKKIPLQCNVILCKT

SEQ ID NO: 297 - protein, 96 aa, Methanobacteriaceae archaeon 41_258
  >KUK01501.1 Methanobacteriaceae archaeon 41_258 OB
IKKSEQIKMASKIIKEGEIGRVINIDNDKIEVKLAPNVEAFNIKWKRVAKPGENVLMLKEKPGEVNVGDLVIIEDENLQVKDKKIPLQCNVILCKT

SEQ ID NO: 298 - protein, 98 aa, Methanobacterium paludis
  >WP_013825588.1 Methanobacterium paludis OB
VKTAQTINVVSKIIDHGEVGKVTDVQGNEVEVTLKKGVEALDLNFNLLAKSGDTIKMEIKDSSKVKIGDKAVVMDENLCIKRTKAGLNCTVMLCKSDK

SEQ ID NO: 299 - protein, 98 aa, Methanobacterium congolense
  >WP_071906792.1 Methanobacterium congolense OB
LKTTETIQMATRIISEGEVGKITSISGDELEVTLKKGVEALDMEWKPLKKAGESVTMQLAEAGEVNVGDKVVVEKENLCIKRSKAGLTCSVIICREEK

SEQ ID NO: 300 - protein, 97 aa, Methanobacterium sp.
  >RJS49378.1 Methanobacterium sp. OB
LEKAEAINMASRILTQGEVGRVVNVDEDRLEIVLGKDVQAFDVNWKQLATPGDKVMMFFNGEGDIIEGDLVVIENERLCLKRNQSPLRCDIILCKSD

SEQ ID NO: 301 - protein, 97 aa, Methanobacteriales archaeon HGWMethanobacteriales1
  >PKL67848.1 Methanobacteriales archaeon HGWMethanobacteriales1 OB
LEKAESIKMAANILTEGEIGRVVSIDEDMLEIILGKNVRAFDTRWKPVAGSGEKILMYSDKPNDVLVGDVAVIENENLCLKRNNSALRCDVILCKTE

SEQ ID NO: 302 - protein, 98 aa, Methanothermobacter marburgensis
  >WP_013295962.1 Methanothermobacter marburgensis OB
LDRREEMKLASRILTEGEVGRVISQDGNHVEVKLSDGVEAYDTRWKRVAGPGENVLMRLSDDVAVAAGEGVAVRNENLCVDGRDIKLECDVIICRTEE

SEQ ID NO: 303 - protein, 98 aa, Methanothermobacter wolfeii
  >WP_074359097.1 Methanothermobacter wolfeii OB
LERSEEIRLASRILTEGEVGRVTGQDGRHIEVKLSEGVEAYDTRWKHVAGAGEKVLMRIPGEGNVDVGDRVVVKDENLCVDGKDLSLECDVIICRKES

SEQ ID NO: 304 - protein, 98 aa, Methanothermobacter sp. CaT2
  >WP_048175474.1 Methanothermobacter sp. CaT2 OB
LDRREEMKLASRILTEGEVGRVMRQDGSHVEVKLAGDVEAYDTRWKKVAGPGDMVLMRVADGGTISPGEKIAVRDENLCVEGRDIKVDCDVIICRREE

SEQ ID NO: 305 - protein, 98 aa, Methanothermobacter thermautotrophicus
  >WP_010876390.1 Methanothermobacter thermautotrophicus OB
LDRREEIKLASRILTEGEVGRVMRQDGSHVEVKLAGDVEAYDTRWKKVAGPGDMVLMRISDGGTLSPGEKIAVRDENLCVEGRDIKVDCDVIICRREE

SEQ ID NO: 306 - protein, 98 aa, Methanothermobacter sp. EMTCatA1
  >BAZ98793.1 Methanothermobacter sp. EMTCatA1 OB
LDRREEIKLASRILTEGEVGRVMRQDGRHVEVKLAGDVEAYDTRWKKVAGPGDMVLMRISDGGTLSPGEKIAVRDENLCVEGRDIKVDCDVIICRREE

SEQ ID NO: 307 - protein, 98 aa, Methanothermobacter defluvii; identical to SEQ ID NO: 306
  >WP_115892198.1 Methanothermobacter defluvii OB

SEQ ID NO: 308 - protein, 5 aa, Artificial Sequence
  Adriase recongition motif
RDPAA

SEQ ID NO: 309 - protein, 5 aa, Artificial Sequence
  Adriase recognition motif
KDPAA

SEQ ID NO: 310 - protein, 5 aa, Methanoculleus thermophilus
  Adriase motif in some Methanomicrobiaceae
RDPGA

SEQ ID NO: 311 - protein, 5 aa, Methanocaldococcus jannaschii
  Adriase motif in most Methanogens
KDPGA

SEQ ID NO: 312 - DNA, 930 bp, Methanothermobacter thermautotrophicus
  Methanothermobacter thermautotrophicus Adriase gene
atgagtctcatcataacctacataagtagcaagggatgcgtcatagctggagataaacggagaatagcctattttggtgataaatcaagtagagaggtacttgaggaggagctgtacacaggcaagataaaaagtgatgaggaactccagaggagggcgtcggagcttggcgtaaatataaaggtcacagatgacacatgcaaggtcagaagccttggcgacgttgttgtgggtgaaataagccagaaaacaccctttgagacaagaagaagaaggatatacgcaacaacaggggcctatcagataattgaactcacaggttcaaggataaccagcatggaaaagggtgatactgcaataatagtcttcggaaataagatagccaaggagattacaaacaggttccttaaaaagaggtggaagacaaagacaagccttaaggatgttgctgacctcttcagggaactcatggaccatgtatcctcacagacaccatctgttggtagtgaatatgatctgttcataaagagcccctcactggataagaagagcgcccacaggcttctgagtgatacaatcgtgagggacgtccgcctcctacagaaatggagggccaaactcaaacaggagatgctagaccgacgggaggagataaaactggcctcaaggatcctcacagagggtgaggtcggcagggttatgaggcaggatgggagccacgtggaggttaaacttgccggtgacgttgaggcctatgacactcgctggaagaaggttgcaggtccaggggacatggtactcatgaggatatcagatggcggcaccctttcacccggcgagaaaatagctgtaagggatgagaacctctgcgtggaggggagagatataaaggtcgactgtgacgtcataatctgtcgcagggaggaataa

SEQ ID NO: 313 - DNA, 921 bp, Methanobrevibacter smithii
  Methanobrevibacter smithii Adriase gene
atgagtttgattattgcttatattggaaaaaaaggatgtgtaatggctagtgataaaagaagaattggttattttgggaataaagagcaattaaatgcattggaatctgaattatacagtggtaaaataaaaaccgatgaggaatttaaaaagaaagctgatgaatacggcatctcaattaagttaactgaagatgctactaaaataaccactgtgggaaattgcgtaaggggagaagtcacaaccaaaaaagtttttgaaacatacaggaaaagaatttacggaactacaatgggttaccagatagtggaattgtcaggttctgaaactgtttcaagggaagccggtgaaaaggcaattattgtatttggtaataaatttgccaaacaggaagcagaaaagctaataaacaaaaaatggaaaccttcattaagtttaaaatatatgggtgatatctttgaagagatacttaccgaaatttctagaaaaacaccaacaattggaaatacttttgatgttttaatcaaacagcctaaattcaacaaatcagaagctcaaagacatcttaatgtaagtattgataaggatattaaggttttatctaaatttagacaaaagcttcaggaagatttaatccaaaaaaataaggaaatagctttggctgataaaattattaataaaggagatgttggtgaagttgtttcagtagatgggaaaatgcttcatgtcaaattaaatagtaaaacacaggcttttgatggaaattggaaacagatagctaagccaaatgaaactgttttcatgttcagtgaccataaccatgtggaacttggagataaggtagttatccaggatgaaaagttatgtcttaaaaaggacaaatctaatcttaaatgtgatataattttatgcagtttataa

SEQ ID NO: 314 - protein, 264 aa, Escherichia coli BL21(DE3)
  >ACT42067.1 METHIONINE AMINOPEPTIDASE [ESCHERICHIA COLI BL21(DE3)]
MAISIKTPEDIEKMRVAGRLAAEVLEMIEPYVKPGVSTGELDRICNDYIVNEQHAVSACLGYHGYPKSVCISINEVVCHGIPDDAKLLKDGDIVNIDVTVIKDGFHGDTSKMFIVGKPTIMGERLCRITQESLYLALRMVKPGINLREIGAAIQKFVEAEGFSVVREYCGHGIGRGFHEEPQVLHYDSRETNVVLKPGMTFTIEPMVNAGKKEIRTMKDGWTVKTKDRSLSAQYEHTIVVTDNGCEILTLRKDDTIPAIISHDE

SEQ ID NO: 315 - protein, 30 aa, Methanofollis ethanolicus
  Adriase recognition motif
EDLGAIKAKIAELKGKDPGAFGEAPIVVEV

SEQ ID NO: 316 - protein, 30 aa, Methanoculleus horonobensis
  Adriase recognition motif
EDMGAIKAKMDELKAKDPGAFGAEPMIVEV

SEQ ID NO: 317 - protein, 30 aa, Methanoculleus
  Methanoculleus sediminis / Methanoculleus marisnigri JR1 / Methanoculleus sp. MH98A / Methanoculleus sp. SDB Adriase recognition motif
EDMGAIKAKIDELKARDPGAFGAEPMIVEV

SEQ ID NO: 318 - protein, 30 aa, Methanoculleus thermophilus
  Adriase recognition motif
EDMGTIKAKINELKARDPGAFGAEPMVVEV

SEQ ID NO: 319 - protein, 30 aa, Methanoculleus bourgensis
  Methanoculleus bourgensis / Methanoculleus bourgensis BA1 / Methanoculleus bourgensis MS2 Adriase recognition motif
EDMGTIKAKIDELKAKDPGAFPAEPMIVEV

SEQ ID NO: 320 - protein, 30 aa, Methanolinea tarda
  Adriase recognition motif
EDLGAIKAKIAELKGRDPGAFAADPMVVEV

SEQ ID NO: 321 - protein, 30 aa, Methanosaeta harundinacea
  Adriase recognition motif
EDTGTIVSKIKECISKDPGALDVEPMTVEI

SEQ ID NO: 322 - protein, 30 aa, Methanothrix soehngenii
  Adriase recognition motif
EDIGAIAGKVKELASKDPGALDVEPMAIEI

SEQ ID NO: 323 - protein, 30 aa, Methanothrix thermoacetophila PT
  Adriase recognition motif
EDMGAITAKIKELVAKDPGALDVEPMIVEI

SEQ ID NO: 324 - protein, 30 aa, Candidatus Methanoperedens sp. BLZ2
  Adriase recognition motif
EDENAIIAKIKELAAKDPGAFDGEPMIIQV

SEQ ID NO: 325 - protein, 30 aa, Methanosarcina thermophila
  Methanosarcina thermophila / Methanosarcina thermophila CHTI-55 Adriase recognition motif
EDMGVITAKVRELASKDPGAFDAEPMIVEI

SEQ ID NO: 326 - protein, 30 aa, Methanosarcina flavescens
  Adriase recognition motif
EDMGAITAKVRELASKDPGAFDAEPMIVEI

SEQ ID NO: 327 - protein, 30 aa, Methanosarcina
  Methanosarcina mazei Go1 / Methanosarcina sp. Kolksee / Methanosarcina vacuolata / Methanosarcina vacuolata Z-761 Adriase recognition motif
EDMGAITSKVRELASKDPGAFDAEPLVVEI

SEQ ID NO: 328 - protein, 30 aa, Methanosarcina
  Methanosarcina mazei / Methanosarcina mazei C16 / Methanosarcina siciliae C2 / Methanosarcina sp. MSH10X1 Adriase recognition motif
EDMGAITSKVRELASKDPGAFDADPLVVEI

SEQ ID NO: 329 - protein, 30 aa, Methanosarcina barkeri
  Methanosarcina barkeri CM1 / Methanosarcina barkeri str. Fusaro Adriase recognition motif
EDMGAITSKVKELASKDPGAFDAEPMIVEI

SEQ ID NO: 330 - protein, 30 aa, Methanosarcina sp. MTP4
  Adriase recognition motif
EDMGVITAKVKELVSKDPGAFDAEPLVVEI

SEQ ID NO: 331 - protein, 30 aa, Methanosarcina
  Methanosarcina sp. 1.H.T.1A.1 / Methanosarcina sp. 2.H.T.1A.3 Adriase recognition motif
EDMGAITAKVRELVSKDPGAFDAEPMVVEI

SEQ ID NO: 332 - protein, 30 aa, Methanoculleus sp. SDB
  Adriase recognition motif
EDMGAISAKISELVGKDPGAFDADPMVVEV

SEQ ID NO: 333 - protein, 30 aa, Methanosarcina siciliae
  Adriase recognition motif
EDMGAITAKVRELVSKDPGAFDAEPLVVEI

SEQ ID NO: 334 - protein, 30 aa, Methanosarcina sp. Ant1
  Adriase recognition motif
EDMGAITSKIRELVSKDPGAFDADPLILQI

SEQ ID NO: 335 - protein, 30 aa, Methanosarcina acetivorans
  Adriase recognition motif
EDMGAITAKVRELVAKDPGAFDAEPMVVEI

SEQ ID NO: 336 - protein, 30 aa, Methanosarcina horonobensis
  Adriase recognition motif
EDMGAITAKVRELVAKDPGAFDADPLVVEI

SEQ ID NO: 337 - protein, 30 aa, Methanosarcina
  Methanosarcina lacustris / Methanosarcina sp. WWM596 Adriase recognition motif
EDMGAITAKVRELVSKDPGAFDAEPMVVVI

SEQ ID NO: 338 - protein, 30 aa, Methanopyrus
  Methanopyrus kandleri / Methanopyrus sp. KOL6 Adriase recognition motif
EDVDEIVKAIEECVEKDPGAYEEGPMTISL

SEQ ID NO: 339 - protein, 30 aa, Methanococcus voltae
  Adriase recognition motif
EDKGKIQQTVKDCISKDPGAFEEDAMVIDL

SEQ ID NO: 340 - protein, 30 aa, Methanococcus aeolicus
  Adriase recognition motif
EDTGKISSAIKDCISKDPGAFEEDPMILDL

SEQ ID NO: 341 - protein, 30 aa, Methanococcus maripaludis
  Methanococcus maripaludis / Methanococcus maripaludis OS7 / Methanococcus maripaludis X1 / Methanococcus maripaludis KA1 Adriase recognition motif
EDTGKISDAIKNCISKDPGAFEEDPMVIEL

SEQ ID NO: 342 - protein, 30 aa, Methanothermococcus okinawensis
  Adriase recognition motif
EDTGKISSAVKECISKDPGAIDEDPFIIEL

SEQ ID NO: 343 - protein, 30 aa, Methanocaldococcus infernus
  Adriase recognition motif
EDIGKITQAIKECLSKDPGAIDEDPYIIQL

SEQ ID NO: 344 - protein, 30 aa, Methanocaldococcus sp. FS406-22
  Adriase recognition motif
EDVGKITQAIKECLSKDPGAIDEDPFIIEL

SEQ ID NO: 345 - protein, 30 aa, Methanocaldococcus vulcanius
  Adriase recognition motif
EDVGKITQAIKECLSKDPGAIDEDPFIIQL

SEQ ID NO: 346 - protein, 30 aa, Methanocaldococcus jannaschii
  Adriase recognition motif
EDIGKITQAIKECLSKDPGAIDEDPFIIEL

SEQ ID NO: 347 - protein, 30 aa, Methanocaldococcus villosus
  Adriase recognition motif
EDINKITQAIKECISKDPGAIDEEPMILEL

SEQ ID NO: 348 - protein, 30 aa, Methanocaldococcus fervens
  Adriase recognition motif
EDVNKITQAIKECISKDPGAIDEEPIVLEL

SEQ ID NO: 349 - protein, 30 aa, Methanococcus vannielii
  Adriase recognition motif
EDKGKITEAIKNCISKDPGALEEDAMVVEL

SEQ ID NO: 350 - protein, 30 aa, Methanotorris igneus
  Adriase recognition motif
EDVSKITAAIKECISKDPGAIDEEPMVLDL

SEQ ID NO: 351 - protein, 30 aa, Methanobrevibacter thaueri
  Methanobrevibacter thaueri / Methanobrevibacter sp. YE315 Adriase recognition motif
EDIGAIQSKINECVEKDPGAFEEEAMVISV

SEQ ID NO: 352 - protein, 30 aa, Methanobrevibacter smithii
  Methanobrevibacter smithii / Methanobrevibacter smithii ATCC 35061 / Methanobrevibacter smithii CAG:186 / Methanobrevibacter smithii DSM 2374 Adriase recognition motif
EDVGAIQAKINECVEKDPGAFEEEAMVISV

SEQ ID NO: 353 - protein, 30 aa, Methanobrevibacter
  Methanobrevibacter millerae / Methanobrevibacter oralis Adriase recognition motif
EDIGTIQSKINECVEKDPGAFEEEAMVISV

SEQ ID NO: 354 - protein, 30 aa, Methanobrevibacter woesei
  Adriase recognition motif
EDVGAINAKISECVEKDPGAFEEEAMVISV

SEQ ID NO: 355 - protein, 30 aa, Methanothermus fervidus
  Adriase recognition motif
EDADQIKEKVKECIEKDPGAFEEEAMVVKV

SEQ ID NO: 356 - protein, 30 aa, Methanothermobacter wolfeii
  Methanothermobacter wolfeii / Methanothermobacter marburgensis Adriase recognition motif
EDADAIKAKVKECIEKDPGAFEEEAMIIKV

SEQ ID NO: 357 - protein, 30 aa, Methanobacterium sp. SMA-27
  Adriase recognition motif
EDAAAIQAKVKECIEKDPGAIEEEAMVIVI

SEQ ID NO: 358 - protein, 30 aa, Methanobacterium lacus
  Adriase recognition motif
EDAAAIQAKVKECIEKDPGAIEEEAMVIEI

SEQ ID NO: 359 - protein, 30 aa, Methanobrevibacter curvatus
  Adriase recognition motif
EDAGAIESKVKECISKDPGAFEEEALVISV

SEQ ID NO: 360 - protein, 30 aa, Methanobacterium paludis
  Adriase recognition motif
EDPAAISSKIKECIEKDPGAFEEEAMVIEV

SEQ ID NO: 361 - protein, 30 aa, Methanobrevibacter olleyae
  Adriase recognition motif
EDGGAITSKVKECIEKDPGAFEEDAMVIEV

SEQ ID NO: 362 - protein, 30 aa, Methanobrevibacter
  Methanobrevibacter wolinii / Methanobrevibacter sp. 87.7 Adriase recognition motif
EDGGAITSKVKECIEKDPGAFEEEALVVEV

SEQ ID NO: 363 - protein, 30 aa, Methanobrevibacter ruminantium
  Adriase recognition motif
EDGGAITAKVKECIEKDPGAFEEDAMVIEV

SEQ ID NO: 364 - protein, 30 aa, Methanobacteriaceae archaeon 41_258
  Adriase recognition motif
EDPGQIQAKVKECIEKDPGAFEEEAMVIEV

SEQ ID NO: 365 - protein, 30 aa, Methanobrevibacter
  Methanobrevibacter arboriphilus / Methanobrevibacter sp. NOE Adriase recognition motif
EDAGAIEAKVKECIEKDPGAFEEEAYVISL

SEQ ID NO: 366 - protein, 30 aa, Artificial Sequence
  Adriase consensus recognition motif
EDMGAITAKVKECISKDPGAFEEEPMVIEV

SEQ ID NO: 367 - protein, 30 aa, Artificial Sequence; identical to SEQ ID NO: 346
  SITE 1: N-terminal FITC-AHX modification
  (15)KDPGA(10)

SEQ ID NO: 368 - protein, 25 aa, Artificial Sequence
  SITE 1: N-terminal FITC-Ahx modification
  (15)KDPGA(5)
EDIGKITQAIKECLSKDPGAIDEDP

SEQ ID NO: 369 - protein, 20 aa, Artificial Sequence
  SITE 1: N-terminal FITC-Ahx Modification
  (15)KDPGA(0)
EDIGKITQAIKECLSKDPGA

SEQ ID NO: 370 - protein, 25 aa, Artificial Sequence
  (10)KDPGA(10)
  SITE 25: C-terminal Lys-FITC modification
ITQAIKECLSKDPGAIDEDPFIIEL

SEQ ID NO: 371 - protein, 20 aa, Artificial Sequence
  C-terminal Lys-FITC modification
  SITE 20: C-terminal Lys-FITC modification
KECLSKDPGAIDEDPFIIEL

SEQ ID NO: 372 - protein, 15 aa, Artificial Sequence
  (0)KDPGA(10)
  SITE 15: C-terminal Lys-FITC modification
KDPGAIDEDPFIIEL

SEQ ID NO: 373 - protein, 20 aa, Artificial Sequence
  PGA(17)
PGAIDEDPFIIELEGGKGGG

SEQ ID NO: 374 - protein, 13 aa, Artificial Sequence
  PGA(10)
PGAIDEDPFIIEL

SEQ ID NO: 375 - protein, 10 aa, Artificial Sequence
  PGA(8)
PGAIDEDPFI

SEQ ID NO: 376 - DNA, 582 bp, Methanosarcina mazei Go1
  MM_2909 gene
atgacccttgttattgcttttattggaaagaacggtgcagtcatggcaggagatatgcgcgaaattacttttgaaggggaaaagcccgatagagagaagctcgaaaaagagctttacagcggatcaatagttacggatgaggaaatgcaaaagaaagcagaggagtttggggtcaaaataacggttgcggattgcaaggagaaagtctcggaaagaaacggtgtccttgtaggggaagtttcttcggctgaaggcggagtcgttaaaaaaagaaggctgtatgcctcggcaggaaatttcgcaatagccgaactgatcaatactgagatgactcttacttcgcaggggaagggaagcaatttcatagcattcggaaacgagtttaccaaacaggtagcaaacaagtgttttaaagataactggactaaaaaaagcaatctgcaggatgcggtgaagatcctcatcctgtgcatggaaactgtggccagaaaaacagcttctgtgagcaaacagttcatgattgtgcagactgcatcgaatgctgatgttttgaaagttgtggaaaaggacagaaactgctga

SEQ ID NO: 377 - DNA, 723 bp, Methanosarcina mazei Go1
  MM_1543 gene
atggcagataaaagagaaccagccccaggatggcctatcctgaaaggagaatacgaagtaggcgatgtaaagaactctgtactggtaattacctgcggctcacaccttccggggaagccgattcttgatgcaggtgcagcctgtaccgggtcatgtaagacagaaaaccttggtattgaaaaggtcgtcgcccatatcatctcaaacccgaacatcagatacctgcttgtaaccggctctgaagttaaggggcacattaccggacagtccatgatgagcctccacgcaaacggtgtaaaagaaaacaggattgcaggagcattgggtgcaattccgtatgtggaaaaccttaatgcagccgcagttgcccgtttccaggaacaggttcaggtcgtcaatctgctcgatactgaagatatgggggctatcacctccaaggtgagagaactggcctcaaaagaccctggtgcctttgatgcggacccactggttgtagaaatcagcgaagagggtgaagaagaagaggaaggtggcgttgtaaggccggtttccggagagatcgctgttctccgtagcaggttgaaagcaattgaagcccgcatgatggatataggaaacttgaacaagttccactcaggagttcacgcaggaaaagtcgaaggcgccatgattgggttgacaataaccatatccctgcttgggttattactgctagggaggtaa

SEQ ID NO: 378 - DNA, 882 bp, Methanocaldococcus jannaschii
  MJ_0548 gene
gtgagtttaattatttgctactatggtaaaaatggggctgtaattggaggagatagaaggcaaatattttttagaggtagtgaggagaatagaaagattttagaagaaaaactatacagtggggagataaaatctgaagaggaactttataaattggcagaaaagcttaacattaaaattataattgaagatgatagggaaaaagttagaaagatatctgattcagtagtatgtggagaagttaggagcttaggaattgatgcaaagagaaggagggtttatgcaacaaaagggaaatgtgccattgttgatatattaaacgacacagttacaaatcaaacaataaaagaaggttttggaattgtagttcttggaaacagattcttaaaaaagaaagctgaggaggaattaaaaagaacagctaaattattcccaatgatgcctatacaacagatagaagatgcaataaaagaaatttttgagaaattaaagtggcatcctacagtgagtaaagagtatgacatttacagtgtgaataaatatgaaaagaactttgaggaagttattaaaaaggatattgagagcctatttaaatatagggaacagttgaggaaacaactcatagattttggaaaggttatgagtatagtcaataaaattgtaaaaaatggagaaattggagttattaaagatggaaaacttcacttatatgatgattatatagctatcgataagatagacccaaatccaaaggtatttaaagttgtggatgtggaaggcaactttaaagatggtgatatagtagttattgaaaatggagatatgaaaataaaagggactaatgagaaagtaacaaccaaatatatcataattcataaataa

SEQ ID NO: 379 - DNA, 738 bp, Methanocaldococcus jannaschii
  MJ_0851 gene
atggtgatgtctatggcaaataaaagagaaccagcaccaggatggccaattgtctctggtgaatatgttgttggaaatccggaaagttgtgttggagttgtaactttaggttctcacggtttggagcaagcatgtatcgatgcaggggctgctatagcaggaccttgccacacagaaaacttgggtattgaaaaggttgtagcaaactatatatcaaacccaaacattaggtttatgattctctgtggttcagaagtccaagggcatataactggacagtgttttaaagcattatgggaaaatggcattggagacgatggaggtattattggagctaaaggggccataccattcttagagaacgtgaataaagaagcagttgaaagatttagaaggcagatagttgaagttgttgatttaattgactgtgaagatattggtaaaataacacaagcaataaaagagtgtttaagtaaagacccaggagctattgacgaagacccatttataattgagttagaaggaggaaaaggaggaggagaagaggaagagggtgttataaaaccaataacaccagaaatggcaataattgagagtagaatgagattaattggaaatgaaatgtgctataatggattgttagcaaagtggcaggcaggatattataatggtaagattcaaggaattgccactggtttgttcttaatgctactaattatgggaatcttaatgttctaa

SEQ ID NO: 380 - protein, 200 aa, Artificial Sequence
  M. mazei Adriase with C-terminal His-tag
TLVIAFIGKNGAVMAGDMREITFEGEKPDREKLEKELYSGSIVTDEEMQKKAEEFGVKITVADCKEKVSERNGVLVGEVSSAEGGVVKKRRLYASAGNFAIAELINTEMTLTSQGKGSNFIAFGNEFTKQVANKCFKDNWTKKSNLQDAVKILILCMETVARKTASVSKQFMIVQTASNADVLKVVEKDRNCGSHHHHHH

SEQ ID NO: 381 - protein, 202 aa, Artificial Sequence
  M. mazei Adriase with C-terminal Strep-tag
TLVIAFIGKNGAVMAGDMREITFEGEKPDREKLEKELYSGSIVTDEEMQKKAEEFGVKITVADCKEKVSERNGVLVGEVSSAEGGVVKKRRLYASAGNFAIAELINTEMTLTSQGKGSNFIAFGNEFTKQVANKCFKDNWTKKSNLQDAVKILILCMETVARKTASVSKQFMIVQTASNADVLKVVEKDRNCGSWSHPQFEK

SEQ ID NO: 382 - protein, 204 aa, Artificial Sequence
  M. mazei Adriase with C-terminal Myc-tag
TLVIAFIGKNGAVMAGDMREITFEGEKPDREKLEKELYSGSIVTDEEMQKKAEEFGVKITVADCKEKVSERNGVLVGEVSSAEGGVVKKRRLYASAGNFAIAELINTEMTLTSQGKGSNFIAFGNEFTKQVANKCFKDNWTKKSNLQDAVKILILCMETVARKTASVSKQFMIVQTASNADVLKVVEKDRNCGSEQKLISEEDL

SEQ ID NO: 383 - protein, 203 aa, Artificial Sequence
  M. mazei Adriase with C-terminal HA-tag
TLVIAFIGKNGAVMAGDMREITFEGEKPDREKLEKELYSGSIVTDEEMQKKAEEFGVKITVADCKEKVSERNGVLVGEVSSAEGGVVKKRRLYASAGNFAIAELINTEMTLTSQGKGSNFIAFGNEFTKQVANKCFKDNWTKKSNLQDAVKILILCMETVARKTASVSKQFMIVQTASNADVLKVVEKDRNCGSYPYDVPDYA

SEQ ID NO: 384 - protein, 200 aa, Artificial Sequence
  M. mazei Adriase T1A mutant with C-terminal His-tag
ALVIAFIGKNGAVMAGDMREITFEGEKPDREKLEKELYSGSIVTDEEMQKKAEEFGVKITVADCKEKVSERNGVLVGEVSSAEGGVVKKRRLYASAGNFAIAELINTEMTLTSQGKGSNFIAFGNEFTKQVANKCFKDNWTKKSNLQDAVKILILCMETVARKTASVSKQFMIVQTASNADVLKVVEKDRNCGSHHHHHH

SEQ ID NO: 385 - protein, 300 aa, Artificial Sequence
  M. jannaschii Adriase with C-terminal His-tag
SLIICYYGKNGAVIGGDRRQIFFRGSEENRKILEEKLYSGEIKSEEELYKLAEKLNIKIIIEDDREKVRKISDSVVCGEVRSLGIDAKRRRVYATKGKCAIVDILNDTVTNQTIKEGFGIVVLGNRFLKKKAEEELKRTAKLFPMMPIQQIEDAIKEIFEKLKWHPTVSKEYDIYSVNKYEKNFEEVIKKDIESLFKYREQLRKQLIDFGKVMSIVNKIVKNGEIGVIKDGKLHLYDDYIAIDKIDPNPKVFKVVDVEGNFKDGDIVVIENGDMKIKGTNEKVTTKYIIIHKGSHHHHHH

SEQ ID NO: 386 - protein, 300 aa, Artificial Sequence
  M. jannaschii Adriase S1A mutant with C-terminal His-tag
ALIICYYGKNGAVIGGDRRQIFFRGSEENRKILEEKLYSGEIKSEEELYKLAEKLNIKIIIEDDREKVRKISDSVVCGEVRSLGIDAKRRRVYATKGKCAIVDILNDTVTNQTIKEGFGIVVLGNRFLKKKAEEELKRTAKLFPMMPIQQIEDAIKEIFEKLKWHPTVSKEYDIYSVNKYEKNFEEVIKKDIESLFKYREQLRKQLIDFGKVMSIVNKIVKNGEIGVIKDGKLHLYDDYIAIDKIDPNPKVFKVVDVEGNFKDGDIVVIENGDMKIKGTNEKVTTKYIIIHKGSHHHHHH

SEQ ID NO: 387 - protein, 209 aa, Artificial Sequence
  M. jannaschii Adriase without OB, with C-terminal His-tag
SLIICYYGKNGAVIGGDRRQIFFRGSEENRKILEEKLYSGEIKSEEELYKLAEKLNIKIIIEDDREKVRKISDSVVCGEVRSLGIDAKRRRVYATKGKCAIVDILNDTVTNQTIKEGFGIVVLGNRFLKKKAEEELKRTAKLFPMMPIQQIEDAIKEIFEKLKWHPTVSKEYDIYSVNKYEKNFEEVIKKDIESLFKYREQGSHHHHHH

SEQ ID NO: 388 - protein, 270 aa, Artificial Sequence
  M. jannaschii Adriase 28-57, C-terminal His6
SLIICYYGKNGAVIGGDRRQIFFRGSGKIIIEDDREKVRKISDSVVCGEVRSLGIDAKRRRVYATKGKCAIVDILNDTVTNQTIKEGFGIVVLGNRFLKKKAEEELKRTAKLFPMMPIQQIEDAIKEIFEKLKWHPTVSKEYDIYSVNKYEKNFEEVIKKDIESLFKYREQLRKQLIDFGKVMSIVNKIVKNGEIGVIKDGKLHLYDDYIAIDKIDPNPKVFKVVDVEGNFKDGDIVVIENGDMKIKGTNEKVTTKYIIIHKGSHHHHHH

SEQ ID NO: 389 - DNA, 969 bp, Methanopyrus kandleri
  Methanopyrus kandleri Adriase gene
ttgaccctggtactggcctacgccgggacggacggtgctctcgtggccggggaccgtcgcaccctagtcgctcgtatggacgaggaaaagatgcggaaagtggaagaaaaactgtactccggtgagataaggaccgaagaagaattggaatcgttcctgaaagatctcgacgtcgaggatggttacttcgagttccacgacgataggaagaaagtctggaaagtgaacgacgaggtagtggccggagaagtcggcgtgagatcggccaaaggcgttcggaggcgccgcgtttacgcgactcccggcgcccacgctatcgttgagcttgaaggggaaaaggtcctctccaagaatttcggcggccccgccctgatcgtggaaggccccaaggtcgtcaaggaactggtgatcgagttcgtgaactccgagctcggagggaaacccgacctggaatccctccggaacgccctggatgacctcttcgagtacgtgtcctccggtacgatcctcgtgagctccgagtacgatgcgtacgaggtgaagggcaaggcggaccccctggctcgagcccgcctccagaaggccatcgacgaggacatcgaacggctccgcgagcacagacggcgactcgccgaggagatgctcaagcatatccgggaaggttacgatatcttgaaggaaggagtcgtcggcgaggtcgtcgaggtcggcaccgaggaagagggtaaaggggtggaggacgttccccccgagcggcggatcgtcgtcaggctcgcggaggacgtcgacgccaggcacatgggggacgtggtcgccggtcccggtgaggagatcgtcatggccgtcgaaggtaatcctgaggaggtggagccgggagatagggtggtggtgaaagacggggtaatgaagatagatggaaaggacctgcccgtgatcacggggtactcaatctgccgaacgagacgttga

SEQ ID NO: 390 - protein, 229 aa, Artificial Sequence
  M. mazei MtrA delta219-240 with N-terminal Strep-tag
MWSHPQFEKGSMADKREPAPGWPILKGEYEVGDVKNSVLVITCGSHLPGKPILDAGAACTGSCKTENLGIEKVVAHIISNPNIRYLLVTGSEVKGHITGQSMMSLHANGVKENRIAGALGAIPYVENLNAAAVARFQEQVQVVNLLDTEDMGAITSKVRELASKDPGAFDADPLVVEISEEGEEEEEGGVVRPVSGEIAVLRSRLKAIEARMMDIGNLNKFHSGVHAGK

SEQ ID NO: 391 - protein, 233 aa, Artificial Sequence
  M. jannaschii MtrA delta225-245 with N-terminal His6-tag
MHHHHHHGSMVMSMANKREPAPGWPIVSGEYVVGNPESCVGVVTLGSHGLEQACIDAGAAIAGPCHTENLGIEKVVANYISNPNIRFMILCGSEVQGHITGQCFKALWENGIGDDGGIIGAKGAIPFLENVNKEAVERFRRQIVEVVDLIDCEDIGKITQAIKECLSKDPGAIDEDPFIIELEGGKGGGEEEEGVIKPITPEMAIIESRMRLIGNEMCYNGLLAKWQAGYYNG

SEQ ID NO: 392 - protein, 105 aa, Artificial Sequence
  Ub-KDPGA(10)
MHHHHHHGSMKIKIVPAVGGGSPLELEVAPNATVGAVRTKVCAMKKLPPDTTRLTYKGRALKDTETLESLGVADGDKFVLITRTVGGCGEKDPGAIDEDPFIIEL

SEQ ID NO: 393 - DNA, 264 bp, Artificial Sequence
  Caldiarchaeum subterraneum ubiquitin gene (Altered codon usage)
atgaaaattaaaattgtacccgccgtgggtggagggagccctctcgaacttgaagtagctccaaacgcgaccgtgggtgcggtgcgtaccaaggtctgtgcgatgaaaaagttgccgccggatacaacgcgcttaacttataaagggcgcgctctgaaagataccgagactctggagtcgctgggcgtcgcagatggtgacaaatttgttctgatcacccgtacggttggcggctgcggcgaaccgatccgccgggccgcataa

SEQ ID NO: 394 - DNA, 35 bp, Artificial Sequence
  forward M. mazei Adriase Primer
ggatcgcatatgacccttgttattgcttttattgg

SEQ ID NO: 395 - DNA, 42 bp, Artificial Sequence
  forward M. mazei Adriase T1A Primer
ggatcgcatatggcccttgttattgcttttattggaaagaac

SEQ ID NO: 396 - DNA, 58 bp, Artificial Sequence
  reverse M. mazei Adriase-His Primer
ggtaacctcgagttagtggtggtggtggtggtgagaaccgcagtttctgtccttttcc

SEQ ID NO: 397 - DNA, 64 bp, Artificial Sequence
  reverse M. mazei Adriase-Strep Primer
ggtaacctcgagttacttttcgaactgaggatgagaccaagaaccgcagtttctgtccttttcc

SEQ ID NO: 398 - DNA, 70 bp, Artificial Sequence
  reverse M. mazei Adriase-Myc Primer
ggtaacctcgagttacaagtcctcctctgaaatcaatttttgctcagaaccgcagtttctgtccttttcc

SEQ ID NO: 399 - DNA, 67 bp, Artificial Sequence
  reverse M. mazei Adriase-HA Primer
ggtaacctcgagttaagcataatcagggacatcatacgggtaagaaccgcagtttctgtccttttcc

SEQ ID NO: 400 - DNA, 44 bp, Artificial Sequence
  forward M. jannaschii Adriase Primer
cgtagtcatatgagtttaattatttgctactatggtaaaaatgg

SEQ ID NO: 401 - DNA, 46 bp, Artificial Sequence
  forward M. jannaschii Adriase S1A Primer
cgtagtcatatggcgttaattatttgctactatggtaaaaatgggg

SEQ ID NO: 402 - DNA, 594 bp, Methanoculleus marisnigri
  Methanoculleus marisnigri Adriase gene
atgacgcttgtgatcgcctttatcggaaaacagggcgccgtgatggcgggggatatgcgggagatcgcattcggaggggacgattcctccatcgaagacctggagcgcgaactctacggcggctcgatcgcctccgacagcgacctcgcaaaacgggcagacgagatcggggtgacgatccagctcagggacgacaaaaccaaggtctcgcagcgggacggggtgctcgtcggcgaggtgaccgagacggagggggcgaagacctcgagaaaaaggctctacgctacgaaaggaagttacgtgattgccgagatcgtcgattcccggctgcgggtgatgcaaaaggggcaggcgagcaacttcgtggtgctgggaaacgataccacgaaagaggttgccaaccagtgcatccaggggatgtgggaagggggaacgatccaggatgccctgcgtctcatcatgctcaccatgcagatagcggcaagcgtaacggcgtcggtgagcagaacgttcgtactggtgcataccgatatcgcggcggatgtcccggccgctatcgctaacgattctcgaaaagaacaaaacccggattga

SEQ ID NO: 403 - DNA, 83 bp, Artificial Sequence
  reverse M. jannaschii Adriase-His Primer
ggtaacctcgagttagtggtggtggtggtggtgagaacctttatgaattatgatatatttggttgttactttctcattagtcc

SEQ ID NO: 404 - DNA, 72 bp, Artificial Sequence
  reverse M. jannaschii Adriase-OB-His Primer
ggtaacctcgagttagtggtggtggtggtggtgagaaccctgttccctatatttaaataggctctcaatatc

SEQ ID NO: 405 - DNA, 60 bp, Artificial Sequence
  forward M. jannaschii Adriase delta28-57
gcaaatattttttagaggtagtggcaaaattataattgaagatgatagggaaaaagttag

SEQ ID NO: 406 - DNA, 60 bp, Artificial Sequence
  reverse M. jannaschii Adriase delta28-57
ctaactttttccctatcatcttcaattataattttgccactacctctaaaaaatatttgc

SEQ ID NO: 407 - DNA, 65 bp, Artificial Sequence
  forward M. mazei Strep-MtrA Primer
ggatcgcatatgtggtctcatcctcagttcgaaaagggttctatggcagataaaagagaaccagc

SEQ ID NO: 408 - DNA, 35 bp, Artificial Sequence
  reverse M. mazei MtrA delta219-240 Primer
ggtaacctcgagttattttcctgcgtgaactcctg

SEQ ID NO: 409 - DNA, 64 bp, Artificial Sequence
  forward M. janaschii His-MtrA Primer
ggatcgcatatgcaccaccaccaccaccacggttctatggtgatgtctatggcaaataaaagag

SEQ ID NO: 410 - DNA, 38 bp, Artificial Sequence
  reverse M. jannaschii MtrA delta225-240 Primer
ggtaacctcgagttaaccattataatatcctgcctgcc

SEQ ID NO: 411 - DNA, 63 bp, Artificial Sequence
  forward His-Ub-KDPGA(10) Primer
ggatcgcatatgcaccaccaccaccaccacggttctatgaaaattaaaattgtacccgccgtg

SEQ ID NO: 412 - DNA, 78 bp, Artificial Sequence
  reverse Ub-KDPGA(10) Primer
ggtaacctcgagttacagttcgatgatgaacgggtcttcgtcgatagcacccgggtctttttcgccgcagccgccaac

SEQ ID NO: 413 - protein, 37 aa, Artificial Sequence
  SITE 1: N-terminal FITC-Ahx modification
  M. jannaschii (F15)KDPGA(17)
EDIGKITQAIKECLSKDPGAIDEDPFIIELEGGKGGG

SEQ ID NO: 414 - protein, 13 aa, Artificial Sequence
  SITE 1: C-terminal Lys-FITC modification
  M. jannaschii PGA(10F)
PGAIDEDPFIIEL

SEQ ID NO: 415 - protein, 32 aa, Artificial Sequence
  M. jannaschii (10)KDPGA(17)
ITQAIKECLSKDPGAIDEDPFIIELEGGKGGG

SEQ ID NO: 416 - protein, 37 aa, Artificial Sequence; identical to SEQ ID NO: 413
  M. jannaschii (15)KDPGA(17)

SEQ ID NO: 417 - protein, 27 aa, Artificial Sequence
  M. jannaschii (5)KDPGA(17)
KECLSKDPGAIDEDPFIIELEGGKGGG

SEQ ID NO: 418 - protein, 30 aa, Artificial Sequence; identical to SEQ ID NO: 346
  M. jannaschii (15)KDPGA(10F)
  SITE 25: C-terminal Lys-FITC modificatio

SEQ ID NO: 419 - protein, 30 aa, Artificial Sequence; identical to SEQ ID NO: 346
  M. jannaschii (15)KDPGA(10)

SEQ ID NO: 420 - protein, 202 aa, Methanocaldococcus jannaschii
  M. jannaschii His-MtrA delta194-245
MHHHHHHGSMVMSMANKREPAPGWPIVSGEYVVGNPESCVGVVTLGSHGLEQACIDAGAAIAGPCHTENLGIEKVVANYISNPNIRFMILCGSEVQGHITGQCFKALWENGIGDDGGIIGAKGAIPFLENVNKEAVERFRRQIVEVVDLIDCEDIGKITQAIKECLSKDPGAIDEDPFIIELEGGKGGGEEEEGVIKPITPE

SEQ ID NO: 421 - protein, 20 aa, Artificial Sequence
  M. jannaschii (5)KDPGA(10)
KECLSKDPGAIDEDPFIIEL

SEQ ID NO: 422 - protein, 87 aa, Candidatus Caldiarchaeum subterraneum
  Caldiarchaeum subterraneum Ubiquitin
MKIKIVPAVGGGSPLELEVAPNATVGAVRTKVCAMKKLPPDTTRLTYKGRALKDTETLESLGVADGDKFVLITRTVGGCGEPIRRAA

SEQ ID NO: 423 - protein, 245 aa, Methanocaldococcus jannaschii
  M. jannaschii MtrA
MVMSMANKREPAPGWPIVSGEYVVGNPESCVGVVTLGSHGLEQACIDAGAAIAGPCHTENLGIEKVVANYISNPNIRFMILCGSEVQGHITGQCFKALWENGIGDDGGIIGAKGAIPFLENVNKEAVERFRRQIVEVVDLIDCEDIGKITQAIKECLSKDPGAIDEDPFIIELEGGKGGGEEEEGVIKPITPEMAIIESRMRLIGNEMCYNGLLAKWQAGYYNGKIQGIATGLFLMLLIMGILMF

SEQ ID NO: 424 - protein, 64 aa, Methanosarcina mazei Go1
  M. mazei MtrA 155-218
PGAFDADPLVVEISEEGEEEEEGGVVRPVSGEIAVLRSRLKAIEARMMDIGNLNKFHSGVHAGK

SEQ ID NO: 425 - protein, 11 aa, Artificial Sequence
  KDTLVIAFIGK
KDTLVIAFIGK

SEQ ID NO: 426 - protein, 10 aa, Artificial Sequence
  DTLVIAFIGK
DTLVIAFIGK

SEQ ID NO: 427 - protein, 182 aa, Artificial Sequence
  MtrAN-UbC Fusion
MHHHHHHGSMVMSMANKREPAPGWPIVSGEYVVGNPESCVGVVTLGSHGLEQACIDAGAAIAGPCHTENLGIEKVVANYISNPNIRFMILCGSEVQGHITGQCFKALWENGIGDDGGIIGAKGAIPFLENVNKEAVERFRRQIVEVVDLIDCEDIGKITQAIKECLSKDPGAIDEDPFIIEL

SEQ ID NO: 428 - protein, 125 aa, Artificial Sequence
  UbN-MtrAC Fusion
MHHHHHHGSMKIKIVPAVGGGSPLELEVAPNATVGAVRTKVCAMKKLPPDTTRLTYKGRALKDTETLESLGVADGDKFVLITRTVGGCGEKDPGAIDEDPFIIELEGGKGGGEEEEGVIKPITPE

SEQ ID NO: 429 - protein, 317 aa, Methanocaldococcus jannaschii
  SITE 1: N-terminal FITC-Ahx-Modification
  M. jannaschii (F15)KD-Adriase
EDIGKITQAIKECLSKDSLIICYYGKNGAVIGGDRRQIFFRGSEENRKILEEKLYSGEIKSEEELYKLAEKLNIKIIIEDDREKVRKISDSVVCGEVRSLGIDAKRRRVYATKGKCAIVDILNDTVTNQTIKEGFGIVVLGNRFLKKKAEEELKRTAKLFPMMPIQQIEDAIKEIFEKLKWHPTVSKEYDIYSVNKYEKNFEEVIKKDIESLFKYREQLRKQLIDFGKVMSIVNKIVKNGEIGVIKDGKLHLYDDYIAIDKIDPNPKVFKVVDVEGNFKDGDIVVIENGDMKIKGTNEKVTTKYIIIHKGSHHHHHH

SEQ ID NO: 430 - DNA, 876 bp, Methanococcus vannielii
  Methanococcus vannielii Adriase gene
atgagcgtaatcatcggttactatggaaaaaacggcgtagtgattgcaggagataaaagaaccattttatttaatggcgaagaaaaaaaacgtgaaatgcttgaagaacttctttattctggaaaaataaaaaacgatgatgatttatcagaaaaatcagccgaattttctgtaaaagtccatattcttgatgaccagaaaaaaattaaacagcttgaaaatacccttattggtgaagtaagaactattggaaaagattcaaagcgaaaaaaaatgtatctttcaaaggacatttgtgtaatactcgatattgaaaacgacaatattgtaaaaaaatcagtaaaaaccggaaccggaatagttgtttttgggaataaatacgtgaaaaaaattgttgaattagaacttaaaaaatacttatccgaaatttcaaagatggatgttttaaaaatcagaacaatttttgaaaaaatattagttggaattgaaaacccgacattgagtaaaggttatgattttttatactgtcaaaatgctgaaaaagatattgaaagcataattaaaaaagatttaaatgatttacgtgaatatcgggaagaactatcgataaaaatggcggaaatgcagaaattaatgactattgtaaacaaaatcgcaaaatcaggcgaaattggaattataaaaaatggtagcttagttttaaatgaaagtttccttgcaattgataaaatttgtttaaaccccgaaatctactctgaaatagatataaacggtaattttaaagaaggagatcttattgaaatccaaaacggggaattaactgttaaaggaacgaataattatgtttctgttcaaaaaataatatgtaatcgttaa

SEQ ID NO: 431 - protein, 365 aa, Methanosarcina mazei Go1
  M. mazei MtrA_N-Adriase conjugate
MWSHPQFEKGSMADKREPAPGWPILKGEYEVGDVKNSVLVITCGSHLPGKPILDAGAACTGSCKTENLGIEKVVAHIISNPNIRYLLVTGSEVKGHITGQSMMSLHANGVKENRIAGALGAIPYVENLNAAAVARFQEQVQVVNLLDTEDMGAITSKVRELASKDTLVIAFIGKNGAVMAGDMREITFEGEKPDREKLEKELYSGSIVTDEEMQKKAEEFGVKITVADCKEKVSERNGVLVGEVSSAEGGVVKKRRLYASAGNFAIAELINTEMTLTSQGKGSNFIAFGNEFTKQVANKCFKDNWTKKSNLQDAVKILILCMETVARKTASVSKQFMIVQTASNADVLKVVEKDRNCGSHHHHHH

SEQ ID NO: 432 - protein, 64 aa, Methanosarcina mazei Go1; identical to SEQ ID NO: 424
  M. mazei MtrA_C fragment

SEQ ID NO: 433 - protein, 392 aa, Artificial Sequence
  M. jannaschii Ub_N-Adriase intermediate
MHHHHHHGSMKIKIVPAVGGGSPLELEVAPNATVGAVRTKVCAMKKLPPDTTRLTYKGRALKDTETLESLGVADGDKFVLITRTVGGCGEKDSLIICYYGKNGAVIGGDRRQIFFRGSEENRKILEEKLYSGEIKSEEELYKLAEKLNIKIIIEDDREKVRKISDSVVCGEVRSLGIDAKRRRVYATKGKCAIVDILNDTVTNQTIKEGFGIVVLGNRFLKKKAEEELKRTAKLFPMMPIQQIEDAIKEIFEKLKWHPTVSKEYDIYSVNKYEKNFEEVIKKDIESLFKYREQLRKQLIDFGKVMSIVNKIVKNGEIGVIKDGKLHLYDDYIAIDKIDPNPKVFKVVDVEGNFKDGDIVVIENGDMKIKGTNEKVTTKYIIIHKGSHHHHHH

SEQ ID NO: 434 - protein, 469 aa, Methanocaldococcus jannaschii
  M. jannaschii MtrA_N-Adriase intermediate
MHHHHHHGSMVMSMANKREPAPGWPIVSGEYVVGNPESCVGVVTLGSHGLEQACIDAGAAIAGPCHTENLGIEKVVANYISNPNIRFMILCGSEVQGHITGQCFKALWENGIGDDGGIIGAKGAIPFLENVNKEAVERFRRQIVEVVDLIDCEDIGKITQAIKECLSKDSLIICYYGKNGAVIGGDRRQIFFRGSEENRKILEEKLYSGEIKSEEELYKLAEKLNIKIIIEDDREKVRKISDSVVCGEVRSLGIDAKRRRVYATKGKCAIVDILNDTVTNQTIKEGFGIVVLGNRFLKKKAEEELKRTAKLFPMMPIQQIEDAIKEIFEKLKWHPTVSKEYDIYSVNKYEKNFEEVIKKDIESLFKYREQLRKQLIDFGKVMSIVNKIVKNGEIGVIKDGKLHLYDDYIAIDKIDPNPKVFKVVDVEGNFKDGDIVVIENGDMKIKGTNEKVTTKYIIIHKGSHHHHHH

SEQ ID NO: 435 - protein, 224 aa, Methanocaldococcus jannaschii
  >WP_010870749.1
MDVMKGTTTVGLICDDAVILATDKRASLGNLVADKEAKKLYKIDDYIAMTIAGSVGDAQAIVRLLIAEAKLYKMRTGRNIPPLACATLLSNILHSSRMFPFLTQIIIGGYDLLEGAKLFSLDPLGGMNEEKTFTATGSGSPIAYGVLEAGYDRDMSVEEGIKLALNALKSAMERDTFSGNGISLAVITKDGVKIFEDEEIEKILDSMKAKPKKKTTKRSRRKSK

SEQ ID NO: 436 - protein, 241 aa, Candidatus Methanoperedens sp. BLZ2
  Candidatus Methanoperedens sp. BLZ2 MtrA
MANKVKPAAGWPVVKGEYDAGNPENCVAVTTCGSHLKGAPQIAAGACITGPHKTENLGIEKIVANIISNPNIRFLLVTGAEVKGHISGEAIIMLHKNGIKDNRIVGSTGAIPYIENLPDDAVKRFQAQVQIVEMMGTEDENAIIAKIKELAAKDPGAFDGEPMIIQVGEAKEAEELGGVKPMSAELASIQARIKGVQQQTIDIGNMNKLMSGIYAGKIEGMMIGLVVGLTILGILIFGGGV

SEQ ID NO: 437 - protein, 239 aa, Methanobacterium formicicum
  Methanobacterium formicicum MtrA
MAEKKSPAEGWPVINGDYVVGDPESPVAATTLASHIEQIAVDAGAAISGPCKTENLGIEKMLANLISNPNIRFLILTGSEVQGHITGQSIEALHENGVDPEKRKIVGATGAIPFIENIPDEGIERFQQQMEIVSIIDVEDAATIQSKVKECIDKDPGAFEEEAMVIVVEEDGEEEEGEEVPPVAPETALIEARMRNIQTQVKSIGGLNRMAAGMYSGKVQGIMIGLVFILTIGTILLLK

SEQ ID NO: 438 - protein, 238 aa, Methanobrevibacter smithii
  Methanobrevibacter smithii MtrA
MADKKEPAAGWPVISGDYIVGDPESPVAVTTLASHIEAELSGAAIAGPCKTENLGVEKVVANIISNPNIRFLILAGAEVQGHITGQSFKALHENGADPDKKKIIGATGAIPFVENVPLEGVERFQQQLEIIDLIDTEDVGAIQAKINECVEKDPGAFEEEAMVISVEGDDGEEDDGEEIKVVSAETALIEARMRNINTKIDMVGSIQRNLAGNYAGKVQGIMIGLAFSLVIGALFLLF

SEQ ID NO: 439 - protein, 239 aa, Methanococcus maripaludis
  Methanococcus maripaludis MtrA
MADKKAPAAGWPVANGEYVVGNPESCVAVVTLGSHGLDQAAIDAGAAISGPCHTENLGIEKVVANYISNPNIRFMVITGSEVQGHITGQCIKALYENGIGDDGGIIGAKGAIPFMENVGTEPVGRLQSQIVECIDLIDVEDTGKISDAIKNCISKDPGAFEEEPMVIELEGGAAAAGEESTSIKPTSPEMALLEARMRIVSEKMNEAAMIAKFNSGYYNGKIQGIAIGLFLSIVIFSLL

SEQ ID NO: 440 - protein, 240 aa, Methanoculleus marisnigri
  Methanoculleus marisnigri MtrA
MVEKKSPASGWPIVQGDFHTGDAQSCVGVVTMGSHLDEQGICDAGAAIAGSCKTENLGLEKIIANVISNPNIRFILCCGTEVKGHLSGQSFIALHEGGVSGGKIVGAQGAIPFIENLSDDAISRFQEQIEIVNIMESEDMGAIKAKIDELKARDPGAFGAEPMIVEVKEAGGAAEEATGEVQPLSGELALVHARMKVIERMVTDIGYRNKFAAGVYSGKIEGLMIGLIVSFVILGFILLG

SEQ ID NO: 441 - protein, 242 aa, Methanofollis ethanolicus
  Methanofollis ethanolicus MtrA
MADKTSPASGWPLVKGDFHSGDANSCVAVVTMGSHLDEQAICDAGAALCGSCKTENLGLEKVIANIVANPNIRFVLLCGTEVKGHLSGQTLKALHESGIEGGKVVGSQGAIPFIENLDDAAIKRFQAQTEFVDIMESEDLGAIKAKIAELKGKDPGAFGEAPIVVEVKEEGGGAEEEGGEIVEMNGDLALIHARFKTIEKMVTDIGYRNRFAAGVYSGKVEGLMIGLIVSFALLGFLWMGAL

SEQ ID NO: 442 - protein, 241 aa, Methanolinea tarda
  Methanolinea tarda MtrA
MAEKKSPASGWPIVQGDFHAGDPQSPVAVMTCGSHLDEKAICDGGAAIAGSCKTENLGLEKVIANIISNPNIRFLLLCGTEVKGHLAGQTMAALHKNGVKDGRVVGAEGAIPFIENLKEDAIKRFQEQVELVNIMEAEDLGAIKAKIAELKGRDPGAFAADPMVVEVKEAAGGGAEEAGGVVQPMSGELALIHARMKVIEKMVTDIGYRDKFAAGVYSGKIEGIMIGLIVSFAILGFMLMG

SEQ ID NO: 443 - protein, 252 aa, Methanopyrus kandleri
  Methanopyrus kandleri MtrA
MLEVPEKAEPAEGWPVVEGDYVVGDPEAPVHVVTLGSHIEEDILKAAGEDKVAIAGPCKTENIGIEKVIANVIANPNIRFGVLCGAEVTGHLTGQCFKAMYENGVDPDSGEIIGAEGAIPYLENIPEEAVERYRDQIVELVDLIDVEDVDEIVKAIEECVEKDPGAYEEGPMTISLEEEEEEELAEVAGMPVSAETVTVEYRINDVRVGVKSIGAMQRYMAGYLSGRTMGLLIGIISGMIFLFLPMVVLGGV

SEQ ID NO: 444 - protein, 242 aa, Methanosaeta harundinacea
  Methanosaeta harundinacea MtrA
MANKKPTSDPWPWLTGEYVVGNPESPVAVVTCGSHLNNAPFIDAGSALAGPCKTENIGIEKMVANIISNPNIRFLIITGMEVKGHITGQAIEAFAANGIDQEGRIVGATGAIPFIQNLTPEAIERFKQQITTINIIDTEDTGTIVSKIKECVSKDPGALDVEPMAVEISEGEAEEEAHGLRPMAGEIANIRARMRQIDAAVMNMGIQNKYSAGIYAGKIEGIAAGLTIVLVLFGLILSIGGM

SEQ ID NO: 445 - protein, 240 aa, Methanosarcina mazei
  Methanosarcina mazei MtrA
MADKREPAPGWPILKGEYEVGDVKNCVLVITCGSHLPGKPILDAGAACTGSCKTENLGIEKVVAHIISNPNIRYLLVTGSEVKGHITGQSMMSLHANGVKENRIAGALGAIPYVENLNAAAVARFQEQVQVVNLLDTEDMGAITSKVRELASKDPGAFDADPLVVEISEEGEEEEEGGVVRPVSGEIAVLRSRLKAIEARMMDIGNLNKFHSGVHAGKVEGAMIGLTITISLLGLLLLGR

SEQ ID NO: 446 - protein, 238 aa, Methanothermobacter thermautotrophicus
  Methanothermobacter thermautotrophicus MtrA
MVEKKSPAEGWPVVNGDYIVGDPESPVAATTLASHIEDVPVEAGAAIAGPCKTENLGIEKMIANLISNPNIRFLILCGSEVQGHITGQSIEALHQNGVDPDKRNIIGATGAIPYIENIPDEGIERFQKQLEIVNLIDVEDADAIKAKVKECIEKDPGAFEEEAMVIKVEEGGEEEEGEEVKPVAPETALIEARMRNIQTQVKMIGSTNRMFAGMYSGKVQGIMIGLAFTLTLGILLLV

SEQ ID NO: 447 - protein, 237 aa, Methanothermus fervidus
  Methanothermus fervidus MtrA
MAEKKEPAEGWPVVSGDYIVGDPESPVAAVTLASHIEDIPIDAGAAIAGPCKTENLGIEKVIANIISNPNIRFLVLCGSEVQGHITGQSIKALHKNGVDDKKKIIGAKGAIPYIENLPEEALERFQKQVEIVDLIDVEDADQIKEKVKECIEKDPGAFEEEAMVVKVEEEEEEGEAEKINPISPETALIEARIRDMQTQIMMVGGIQRMWAGMYAGKIQGTGIGLALTLLIGFILLI

SEQ ID NO: 448 - protein, 243 aa, Methanothrix thermoacetophila PT
  Methanothrix thermoacetophila PT MtrA
MVLKKKPAEPWPVITGEYEVGNPESPVAVVTCGSHLNNAELVAAGAALAGPCKTENIGIEKMVANVISNPNIRYLIITGMEVKGHITGQAIEAFTASGIDKEGRIVGAKGAIPFIQNLTPEAIERWRQQITTINMIDTEDMGAITAKIKELVAKDPGALDVEPMIVEIKEGAGEEGEAGLRPMAAEVVEVRSRIRAMDMAVTNNGLLNKFQAGVYVGKIEGIAVGMTLTLAIFGIILKMVGGS

SEQ ID NO: 449 - protein, 243 aa, Methanotorris igneus
  Methanotorris igneus MtrA
MANKKAPAAGWPIVSGEYVVGNPESCVGVVTLGSHGLEQACIDAGAAIAGPCHTENLGIEKVVANYISNPNIRFMVLCGSEVQGHITGQCFKALWENGIGDDGGIIGAKGAIPFLENVGKDAVERFQRQIVEVVDLIDCEDVSKITAAIKECISKDPGAIDEEPMVLDLEGGGAGGEEEGATVKPTSPEIALIEARMRLISEKINDAAILAKYNAGYYNGKVQGIAIGLFLSLLLFSLIHPLL

SEQ ID NO: 450 - protein, 313 aa, Methanocaldococcus jannaschii
  N-terminally modified M. jannaschii Adriase
MGSSHHHHHHSSGLVPRGSHMSLIICYYGKNGAVIGGDRRQIFFRGSEENRKILEEKLYSGEIKSEEELYKLAEKLNIKIIIEDDREKVRKISDSVVCGEVRSLGIDAKRRRVYATKGKCAIVDILNDTVTNQTIKEGFGIVVLGNRFLKKKAEEELKRTAKLFPMMPIQQIEDAIKEIFEKLKWHPTVSKEYDIYSVNKYEKNFEEVIKKDIESLFKYREQLRKQLIDFGKVMSIVNKIVKNGEIGVIKDGKLHLYDDYIAIDKIDPNPKVFKVVDVEGNFKDGDIVVIENGDMKIKGTNEKVTTKYIIIHK

SEQ ID NO: 451 - DNA, 35 bp, Methanocaldococcus jannaschii
  forward N-terminally modified M. jannaschii Adriase Primer
ggcggccatatgagtttaattatttgctactatgg

SEQ ID NO: 452 - DNA, 35 bp, Methanocaldococcus jannaschii
  reverse N-terminally modified M. jannaschii Adriase Primer
cgcctcgagttatttatgaattatgatatatttgg

SEQ ID NO: 453 - protein, 20 aa, Artificial Sequence
  M. mazei (5)KDPGA(10F)
  SITE 20: C-terminal Lys-FITC modification
RELASKDPGAFDADPLVVEI

SEQ ID NO: 454 - protein, 13 aa, Artificial Sequence
  M. mazei PGA(10)
PGAFDADPLVVEI

SEQ ID NO: 455 - protein, 13 aa, Artificial Sequence
  M. mazei PGA(10F)
PGAFDADPLVVEI

SEQ ID NO: 456 - protein, 25 aa, Artificial Sequence
  SITE 1: N-terminal FITC-Ahx modification
  M. mazei (F15)KDPGA(10)
ITSKVRELASKDPGAFDADPLVVEI

SEQ ID NO: 457 - protein, 28 aa, Artificial Sequence
  M. mazei PGA(25)
PGAFDADPLVVEISEEGEEEEEGGVVRP

SEQ ID NO: 458 - protein, 12 aa, Artificial Sequence
  SITE 1: N-terminal FITC-Ahx modification
  M. mazei (F10)KD
ITSKVRELASKD

SEQ ID NO: 459 - protein, 40 aa, Artificial Sequence
  SITE 1: N-terminal FITC-Ahx modification
  M. mazei (F10)KDPGA(25)
ITSKVRELASKDPGAFDADPLVVEISEEGEEEEEGGVVRP

SEQ ID NO: 460 - protein, 30 aa, Methanobrevibacter filiformis
  Adriase recognition motif
EDAAAIESKVKECIEKDPGAFEEEALVISV

SEQ ID NO: 461 - protein, 30 aa, Methanobacterium sp. PtaU1.Bin097
  Adriase recognition motif
EDAAAIQSKIKECIEKDPGAFEEEAMVVKV

SEQ ID NO: 462 - protein, 30 aa, Methanobacterium sp. PtaU1.Bin097
  Secondary Adriase recognition motif
EDRSEITAQIQGCIEKDPGAVEEETVVIKL

SEQ ID NO: 463 - protein, 30 aa, Methanobacteriales archaeon HGW-Methanobacteriales-1
  Adriase recognition motif
EDAAAIQSKVKECIEKDPGAFEEEAMVIKV

SEQ ID NO: 464 - protein, 30 aa, Methanobacterium sp. BRmetb2
  Adriase recognition motif
EDAAAIQSKVKECVEKDPGAFEEEAMVIEI

SEQ ID NO: 465 - protein, 30 aa, Methanobacterium
  Methanobacterium sp. Maddingley MBC34 / Methanobacterium sp. PtaB.Bin024 / Methanobacteriales archaeon HGW-Methanobacteriales-2 / Methanobacterium subterraneum Adriase recognition motif
EDAATIQSKVKECIDKDPGAFEEEAMVIEV

SEQ ID NO: 466 - protein, 30 aa, Methanobacterium sp. Maddingley MBC34
  Secondary Adriase recognition motif
EDAAAIQSKVKDCIEKDPGAVESETMIIKL

SEQ ID NO: 467 - protein, 30 aa, Methanobacterium sp. PtaB.Bin024
  Secondary Adriase recognition motif
EDAAAIQSQVKECIEKDPGAAEEETMVIEI

SEQ ID NO: 468 - protein, 30 aa, Methanobacterium subterraneum
  Secondary Adriase recognition motif
EDATTIQSKVKECIEKDPGAVESETMVIEL

SEQ ID NO: 469 - protein, 30 aa, Methanobacterium
  Methanobacterium formicicum DSM 3637 / Methanobacterium sp. BAmetb5 / Methanobacterium sp. MB1 Adriase recognition motif
EDAATIQSKVKECIDKDPGAFEEEAMVIKV

SEQ ID NO: 470 - protein, 30 aa, Methanobacterium formicicum
  Methanobacterium formicicum /Methanobacterium formicicum BRM9 / Methanobacterium formicicum DSM1535 / Methanobacterium formicicum MB9 Adriase recognition motif
EDAATIQSKVKECIDKDPGAFEEEAMVIVV

SEQ ID NO: 471 - protein, 30 aa, Methanothermobacter
  Methanothermobacter defluvii / Methanothermobacter sp. CaT2 / Methanothermobacter sp. EMTCatA1 / Methanothermobacter thermautotrophicus Adriase recognition motif
EDADAIKAKVKECIEKDPGAFEEEAMVIKV

SEQ ID NO: 472 - protein, 30 aa, Methanobacterium sp.
  Adriase recognition motif
EDAAAIQSKVKECVEKDPGAFEEEAMVIKV

SEQ ID NO: 473 - protein, 30 aa, Methanobrevibacter arboriphilus DSM 1125
  Adriase recognition motif
EDAGAIEAKVKECIEKDPGAFEEDAYVISL

SEQ ID NO: 474 - protein, 30 aa, Methanobacterium bryantii
  Adriase recognition motif
EDAGQIQAKVKECIEKDPGAFEEEAMVIKV

SEQ ID NO: 475 - protein, 30 aa, Methanobacterium bryantii
  Secondary Adriase recognition motif
EDAGQIQGKVKECIEKDPGAYEEEPIAIRL

SEQ ID NO: 476 - protein, 30 aa, Methanobrevibacter wolinii
  Secondary Adriase recognition motif
EDGGAITSKVKECIEKDPGAFEEKSMVISI

SEQ ID NO: 477 - protein, 30 aa, Methanobrevibacter
  Methanobrevibacter sp. YE315 / Methanobrevibacter thaueri Secondary Adriase recognition motif
EDIGAIQSKINECVEKDPGALEEDPIVMEV

SEQ ID NO: 478 - protein, 30 aa, Methanococcales archaeon HHB
  Adriase recognition motif
EDIGKITQAIKECISKDPGATEEDAEEIDL

SEQ ID NO: 479 - protein, 30 aa, Methanobrevibacter gottschalkii
  Adriase recognition motif
EDIGNIQSKINECIEKDPGALEEDPIVMEV

SEQ ID NO: 480 - protein, 30 aa, Methanococcus maripaludis C5
  Adriase recognition motif
EDKGKIADAIKNCISKDPGAFEEDPMVIEL

SEQ ID NO: 481 - protein, 30 aa, Methanoregulaceae archaeon PtaU1.Bin059
  Adriase recognition motif
EDLGAIKAKINELKGRDPGAFAADPMVVEV

SEQ ID NO: 482 - protein, 30 aa, Methanoculleus chikugoensis
  Adriase recognition motif
EDMGAIKAKIDELKAKDPGAFGAEPMIVEV

SEQ ID NO: 483 - protein, 30 aa, Methanoculleus sediminis
  Secondary Adriase recognition motif
EDMGAIKAKIDELKARDPGAFGAEPMVVEV

SEQ ID NO: 484 - protein, 30 aa, Methanoculleus sp. MH98A
  Secondary Adriase recognition motif
EDMGVIKAKIDELKARDPGAFGAEPMVVEV

SEQ ID NO: 485 - protein, 30 aa, Methanobacteriales archaeon HGW-Methanobacteriales-2; identical to SEQ ID NO: 465
  Adriase recognition motif

SEQ ID NO: 486 - protein, 30 aa, Methanoculleus sp. SDB; identical to SEQ ID NO: 332
  Secondary Adriase recognition motif

SEQ ID NO: 487 - protein, 30 aa, Methanoculleus horonobensis
  Secondary Adriase recognition motif
EDMGAIKAKMDELKARDPGAFGAEPMIVEV

SEQ ID NO: 488 - protein, 30 aa, Methanoculleus taiwanensis
  Adriase recognition motif
EDMGAISAKIKELTARDPGAFGADPMIIEV

SEQ ID NO: 489 - protein, 30 aa, Methanoculleus taiwanensis
  Secondary Adriase recognition motif
EDMGAISAKIKELTARDPGAFGAEPMIIEV

SEQ ID NO: 490 - protein, 30 aa, Methanosarcina
  Methanosarcina sp. 1.H.A.2.2 / Methanosarcina sp. 2.H.A.1B.4 Adriase recognition motif
EDMGAITAKVRELASKDPGAFDAEPMVVVI

SEQ ID NO: 491 - protein, 30 aa, Methanosaeta sp. PtaU1.Bin112
  Adriase recognition motif
EDMGAITGKIKELVSKDPGALDVDPMTIEI

SEQ ID NO: 492 - protein, 30 aa, Methanobacterium sp.
  Adriase recognition motif
EDPATISAKVKECIEKDPGAFEEEAMVVEV

SEQ ID NO: 493 - protein, 30 aa, Methanosarcina barkeri 3
  Adriase recognition motif
EDMGAITSKVRELASKDPGAFEAEPLVVEI

SEQ ID NO: 494 - protein, 30 aa, Methanoculleus bourgensis MAB1
  Secondary Adriase recognition motif
EDMGTIKAKIDELKAKDPGAFPEEPMVVEV

SEQ ID NO: 495 - protein, 30 aa, Methanoculleus sp. MAB1; identical to SEQ ID NO: 494
  Adriase recognition motif

SEQ ID NO: 496 - protein, 30 aa, Methanobacterium congolense
  Adriase recognition motif
EDPASIQSKVKECIEKDPGAFEEEAMVIEI

SEQ ID NO: 497 - protein, 30 aa, Methanothermobacter tenebrarum
  Adriase recognition motif
EDPEQIKAKVKECIEKDPGAFEEEAMVIEV

SEQ ID NO: 498 - protein, 30 aa, Methanothermobacter sp. MT-2
  Adriase recognition motif
EDPGPIQSKVKECIEKDPGAFEEEAMVIEV

SEQ ID NO: 499 - protein, 30 aa, Methanococcus maripaludis C7
  Adriase recognition motif
EDTAKIAAAIKNCTSQDPDAIDEEPMVVDL

SEQ ID NO: 500 - protein, 30 aa, Methanococcus maripaludis C7
  Secondary Adriase recognition motif
EDTGKISAAVKSCISKDPGAFDAEPMIIEL

SEQ ID NO: 501 - protein, 30 aa, Methanococcus maripaludis C6
  Adriase recognition motif
EDTAKIAAAIKNCTSQDPDALDEEPMVVDL

SEQ ID NO: 502 - protein, 30 aa, Methanococcus maripaludis C6
  Secondary Adriase recognition motif
EDTGKIAAAVKNCISKDPGAFDGEPMIIEL

SEQ ID NO: 503 - protein, 30 aa, Methanococcus maripaludis S2
  Adriase recognition motif
EDTGKISDAIKNCISKDPGAFEEEPMVIEL

SEQ ID NO: 504 - protein, 30 aa, Methanococcus aeolicus Nankai-3
  Secondary Adriase recognition motif
EDTGKISSVIKDCISKDPGAFEEDPMILDL

SEQ ID NO: 505 - protein, 30 aa, Methanocaldococcus bathoardescens
  Adriase recognition motif
EDTGKITQAIKECISKDPGAIDEDPMVIDL

SEQ ID NO: 506 - protein, 30 aa, Methanotorris formicicus Mc-S-70
  Adriase recognition motif
EDTGKITSAIKECISKDPGAIDEESMVLEL

SEQ ID NO: 507 - protein, 30 aa, Methanotorris formicicus Mc-S-70
  Secondary Adriase recognition motif
EDTGKITSAIKECISKDPGAIDEEPMVLEL

SEQ ID NO: 508 - protein, 30 aa, Methanosaeta harundinacea 6Ac
  Adriase recognition motif
EDTGTIVSKIKECVSKDPGALDVEPMAVEI

SEQ ID NO: 509 - protein, 30 aa, Methanosaeta sp. PtaB.Bin087
  Adriase recognition motif
EDTGTIVSRIKECISKDPGALDAEPMTIVI

SEQ ID NO: 510 - protein, 30 aa, Methanobrevibacter
  Methanobrevibacter boviskoreani / Methanobrevibacter sp. AbM4 Adriase recognition motif
EDVGAITAKVKECIEKDPGAIEEEAMVIDV

SEQ ID NO: 511 - protein, 312 aa, Methanocaldococcus jannaschii
  N-terminally modified M. jannaschii Adriase delta1
GSSHHHHHHSSGLVPRGSHMSLIICYYGKNGAVIGGDRRQIFFRGSEENRKILEEKLYSGEIKSEEELYKLAEKLNIKIIIEDDREKVRKISDSVVCGEVRSLGIDAKRRRVYATKGKCAIVDILNDTVTNQTIKEGFGIVVLGNRFLKKKAEEELKRTAKLFPMMPIQQIEDAIKEIFEKLKWHPTVSKEYDIYSVNKYEKNFEEVIKKDIESLFKYREQLRKQLIDFGKVMSIVNKIVKNGEIGVIKDGKLHLYDDYIAIDKIDPNPKVFKVVDVEGNFKDGDIVVIENGDMKIKGTNEKVTTKYIIIHK

SEQ ID NO: 512 - protein, 304 aa, Methanocaldococcus jannaschii
  N-terminally modified M. jannaschii Adriase delta8
HSSGLVPRGSHMSLIICYYGKNGAVIGGDRRQIFFRGSEENRKILEEKLYSGEIKSEEELYKLAEKLNIKIIIEDDREKVRKISDSVVCGEVRSLGIDAKRRRVYATKGKCAIVDILNDTVTNQTIKEGFGIVVLGNRFLKKKAEEELKRTAKLFPMMPIQQIEDAIKEIFEKLKWHPTVSKEYDIYSVNKYEKNFEEVIKKDIESLFKYREQLRKQLIDFGKVMSIVNKIVKNGEIGVIKDGKLHLYDDYIAIDKIDPNPKVFKVVDVEGNFKDGDIVVIENGDMKIKGTNEKVTTKYIIIHK

SEQ ID NO: 513 - protein, 302 aa, Methanocaldococcus jannaschii
  N-terminally modified M. jannaschii Adriase delta10
SGLVPRGSHMSLIICYYGKNGAVIGGDRRQIFFRGSEENRKILEEKLYSGEIKSEEELYKLAEKLNIKIIIEDDREKVRKISDSVVCGEVRSLGIDAKRRRVYATKGKCAIVDILNDTVTNQTIKEGFGIVVLGNRFLKKKAEEELKRTAKLFPMMPIQQIEDAIKEIFEKLKWHPTVSKEYDIYSVNKYEKNFEEVIKKDIESLFKYREQLRKQLIDFGKVMSIVNKIVKNGEIGVIKDGKLHLYDDYIAIDKIDPNPKVFKVVDVEGNFKDGDIVVIENGDMKIKGTNEKVTTKYIIIHK

SEQ ID NO: 514 - protein, 301 aa, Methanocaldococcus jannaschii
  N-terminally modified M. jannaschii Adriase delta11
GLVPRGSHMSLIICYYGKNGAVIGGDRRQIFFRGSEENRKILEEKLYSGEIKSEEELYKLAEKLNIKIIIEDDREKVRKISDSVVCGEVRSLGIDAKRRRVYATKGKCAIVDILNDTVTNQTIKEGFGIVVLGNRFLKKKAEEELKRTAKLFPMMPIQQIEDAIKEIFEKLKWHPTVSKEYDIYSVNKYEKNFEEVIKKDIESLFKYREQLRKQLIDFGKVMSIVNKIVKNGEIGVIKDGKLHLYDDYIAIDKIDPNPKVFKVVDVEGNFKDGDIVVIENGDMKIKGTNEKVTTKYIIIHK

SEQ ID NO: 515 - protein, 292 aa, Methanocaldococcus jannaschii; identical to SEQ ID NO: 159
  N-terminally modified M. jannaschii Adriase delta21

SEQ ID NO: 516 - DNA, 5422 bp, vectors
atccggatatagttcctcctttcagcaaaaaacccctcaagacccgtttagaggccccaaggggttatgctagttattgctcagcggtggcagcagccaactcagcttcctttcgggctttgttagcagccggatctcagtggtggtggtggtggtgctcgagtgcggccgcaagcttgtcgacggagctcgaattcggatccgatatcagccatggccttgtcgtcgtcgtcggtacccagatctgggctgtccatgtgctggcgttcgaatttagcagcagcggtttctttcataccagaaccgcgtggcaccagaccagaagaatgatgatgatgatggtgcatatgtatatctccttcttaaagttaaacaaaattatttctagaggggaattgttatccgctcacaattcccctatagtgagtcgtattaatttcgcgggatcgagatcgatctcgatcctctacgccggacgcatcgtggccggcatcaccggcgccacaggtgcggttgctggcgcctatatcgccgacatcaccgatggggaagatcgggctcgccacttcgggctcatgagcgcttgtttcggcgtgggtatggtggcaggccccgtggccgggggactgttgggcgccatctccttgcatgcaccattccttgcggcggcggtgctcaacggcctcaacctactactgggctgcttcctaatgcaggagtcgcataagggagagcgtcgagatcccggacaccatcgaatggcgcaaaacctttcgcggtatggcatgatagcgcccggaagagagtcaattcagggtggtgaatgtgaaaccagtaacgttatacgatgtcgcagagtatgccggtgtctcttatcagaccgtttcccgcgtggtgaaccaggccagccacgtttctgcgaaaacgcgggaaaaagtggaagcggcgatggcggagctgaattacattcccaaccgcgtggcacaacaactggcgggcaaacagtcgttgctgattggcgttgccacctccagtctggccctgcacgcgccgtcgcaaattgtcgcggcgattaaatctcgcgccgatcaactgggtgccagcgtggtggtgtcgatggtagaacgaagcggcgtcgaagcctgtaaagcggcggtgcacaatcttctcgcgcaacgcgtcagtgggctgatcattaactatccgctggatgaccaggatgccattgctgtggaagctgcctgcactaatgttccggcgttatttcttgatgtctctgaccagacacccatcaacagtattattttctcccatgaagacggtacgcgactgggcgtggagcatctggtcgcattgggtcaccagcaaatcgcgctgttagcgggcccattaagttctgtctcggcgcgtctgcgtctggctggctggcataaatatctcactcgcaatcaaattcagccgatagcggaacgggaaggcgactggagtgccatgtccggttttcaacaaaccatgcaaatgctgaatgagggcatcgttcccactgcgatgctggttgccaacgatcagatggcgctgggcgcaatgcgcgccattaccgagtccgggctgcgcgttggtgcggacatctcggtagtgggatacgacgataccgaagacagctcatgttatatcccgccgttaaccaccatcaaacaggattttcgcctgctggggcaaaccagcgtggaccgcttgctgcaactctctcagggccaggcggtgaagggcaatcagctgttgcccgtctcactggtgaaaagaaaaaccaccctggcgcccaatacgcaaaccgcctctccccgcgcgttggccgattcattaatgcagctggcacgacaggtttcccgactggaaagcgggcagtgagcgcaacgcaattaatgtaagttagctcactcattaggcaccgggatctcgaccgatgcccttgagagccttcaacccagtcagctccttccggtgggcgcggggcatgactatcgtcgccgcacttatgactgtcttctttatcatgcaactcgtaggacaggtgccggcagcgctctgggtcattttcggcgaggaccgctttcgctggagcgcgacgatgatcggcctgtcgcttgcggtattcggaatcttgcacgccctcgctcaagccttcgtcactggtcccgccaccaaacgtttcggcgagaagcaggccattatcgccggcatggcggccccacgggtgcgcatgatcgtgctcctgtcgttgaggacccggctaggctggcggggttgccttactggttagcagaatgaatcaccgatacgcgagcgaacgtgaagcgactgctgctgcaaaacgtctgcgacctgagcaacaacatgaatggtcttcggtttccgtgtttcgtaaagtctggaaacgcggaagtcagcgccctgcaccattatgttccggatctgcatcgcaggatgctgctggctaccctgtggaacacctacatctgtattaacgaagcgctggcattgaccctgagtgatttttctctggtcccgccgcatccataccgccagttgtttaccctcacaacgttccagtaaccgggcatgttcatcatcagtaacccgtatcgtgagcatcctctctcgtttcatcggtatcattacccccatgaacagaaatcccccttacacggaggcatcagtgaccaaacaggaaaaaaccgcccttaacatggcccgctttatcagaagccagacattaacgcttctggagaaactcaacgagctggacgcggatgaacaggcagacatctgtgaatcgcttcacgaccacgctgatgagctttaccgcagctgcctcgcgcgtttcggtgatgacggtgaaaacctctgacacatgcagctcccggagacggtcacagcttgtctgtaagcggatgccgggagcagacaagcccgtcagggcgcgtcagcgggtgttggcgggtgtcggggcgcagccatgacccagtcacgtagcgatagcggagtgtatactggcttaactatgcggcatcagagcagattgtactgagagtgcaccatatatgcggtgtgaaataccgcacagatgcgtaaggagaaaataccgcatcaggcgctcttccgcttcctcgctcactgactcgctgcgctcggtcgttcggctgcggcgagcggtatcagctcactcaaaggcggtaatacggttatccacagaatcaggggataacgcaggaaagaacatgtgagcaaaaggccagcaaaaggccaggaaccgtaaaaaggccgcgttgctggcgtttttccataggctccgcccccctgacgagcatcacaaaaatcgacgctcaagtcagaggtggcgaaacccgacaggactataaagataccaggcgtttccccctggaagctccctcgtgcgctctcctgttccgaccctgccgcttaccggatacctgtccgcctttctcccttcgggaagcgtggcgctttctcatagctcacgctgtaggtatctcagttcggtgtaggtcgttcgctccaagctgggctgtgtgcacgaaccccccgttcagcccgaccgctgcgccttatccggtaactatcgtcttgagtccaacccggtaagacacgacttatcgccactggcagcagccactggtaacaggattagcagagcgaggtatgtaggcggtgctacagagttcttgaagtggtggcctaactacggctacactagaaggacagtatttggtatctgcgctctgctgaagccagttaccttcggaaaaagagttggtagctcttgatccggcaaacaaaccaccgctggtagcggtggtttttttgtttgcaagcagcagattacgcgcagaaaaaaaggatctcaagaagatcctttgatcttttctacggggtctgacgctcagtggaacgaaaactcacgttaagggattttggtcatgaacaataaaactgtctgcttacataaacagtaatacaaggggtgttatgagccatattcaacgggaaacgtcttgctctaggccgcgattaaattccaacatggatgctgatttatatgggtataaatgggctcgcgataatgtcgggcaatcaggtgcgacaatctatcgattgtatgggaagcccgatgcgccagagttgtttctgaaacatggcaaaggtagcgttgccaatgatgttacagatgagatggtcagactaaactggctgacggaatttatgcctcttccgaccatcaagcattttatccgtactcctgatgatgcatggttactcaccactgcgatccccgggaaaacagcattccaggtattagaagaatatcctgattcaggtgaaaatattgttgatgcgctggcagtgttcctgcgccggttgcattcgattcctgtttgtaattgtccttttaacagcgatcgcgtatttcgtctcgctcaggcgcaatcacgaatgaataacggtttggttgatgcgagtgattttgatgacgagcgtaatggctggcctgttgaacaagtctggaaagaaatgcataaacttttgccattctcaccggattcagtcgtcactcatggtgatttctcacttgataaccttatttttgacgaggggaaattaataggttgtattgatgttggacgagtcggaatcgcagaccgataccaggatcttgccatcctatggaactgcctcggtgagttttctccttcattacagaaacggctttttcaaaaatatggtattgataatcctgatatgaataaattgcagtttcatttgatgctcgatgagtttttctaagaattaattcatgagcggatacatatttgaatgtatttagaaaaataaacaaataggggttccgcgcacatttccccgaaaagtgccacctgaaattgtaaacgttaatattttgttaaaattcgcgttaaatttttgttaaatcagctcattttttaaccaataggccgaaatcggcaaaatcccttataaatcaaaagaatagaccgagatagggttgagtgttgttccagtttggaacaagagtccactattaaagaacgtggactccaacgtcaaagggcgaaaaaccgtctatcagggcgatggcccactacgtgaaccatcaccctaatcaagttttttggggtcgaggtgccgtaaagcactaaatcggaaccctaaagggagcccccgatttagagcttgacggggaaagccggcgaacgtggcgagaaaggaagggaagaaagcgaaaggagcgggcgctagggcgctggcaagtgtagcggtcacgctgcgcgtaaccaccacacccgccgcgcttaatgcgccgctacagggcgcgtcccattcgcca

SEQ ID NO: 517 - protein, 154 aa, Methanosarcina mazei Go1
  M. mazei MtrA 1-154
MADKREPAPGWPILKGEYEVGDVKNSVLVITCGSHLPGKPILDAGAACTGSCKTENLGIEKVVAHIISNPNIRYLLVTGSEVKGHITGQSMMSLHANGVKENRIAGALGAIPYVENLNAAAVARFQEQVQVVNLLDTEDMGAITSKVRELASKD

SEQ ID NO: 518 - protein, 181 aa, Methanosarcina mazei Go1
  His6- M. mazei MtrA delta174-245 with N-terminal His-tag
MHHHHHHGSMVMSMANKREPAPGWPIVSGEYVVGNPESCVGVVTLGSHGLEQACIDAGAAIAGPCHTENLGIEKVVANYISNPNIRFMILCGSEVQGHITGQCFKALWENGIGDGGIIGAKGAIPFLENVNKEAVERFRRQIVEVVDLIDCEDIGKITQAIKECLSKDPGAIDEDPFIIEL

SEQ ID NO: 519 - protein, 102 aa, Methanosarcina mazei Go1
  Adriase NTN with C-terminal His-tag
MEQLRKQLIDFGKVMSIVNKIVKNGEIGVIKDGKLHLYDDYIAIDKIDPNPKVFKVVDVEGNFKDGDIVVIENGDMKIKGTNEKVTTKYIIIHKGSHHHHHH

SEQ ID NO: 520 - protein, 112 aa, Artificial Sequence
  Ub-(5)KDPGA(15) with N-terminal His-tag
MHHHHHHGSMKIKIVPAVGGGSPLELEVAPNATVGAVRTKVCAMKKLPPDTTRLTYKGRALKDTETLESLGVADGDKFVLITRTVGGRELASKDPGAFDADPLVVEISEEGE

SEQ ID NO: 521 - protein, 107 aa, Artificial Sequence
  PGA(15)-Ub with C-terminal His-tag
PGAFDADPLVVEISEEGEMKIKIVPAVGGGSPLELEVAPNATVGAVRTKVCAMKKLPPDTTRLTYKGRALKDTETLESLGVADGDKFVLITRTVGGCGEGSHHHHHH

SEQ ID NO: 522 - protein, 122 aa, Artificial Sequence
  Ub-(5)KDPGA(15) with N-terminal His- and C-terminal Strep-tag
MHHHHHHGSMKIKIVPAVGGGSPLELEVAPNATVGAVRTKVCAMKKLPPDTTRLTYKGRALKDTETLESLGVADGDKFVLITRTVGGRELASKDPGAFDADPLVVEISEEGEGSWSHPQFEK

SEQ ID NO: 523 - protein, 94 aa, Artificial Sequence
  Ub-(5)KD with N-terminal His-tag
MHHHHHHGSMKIKIVPAVGGGSPLELEVAPNATVGAVRTKVCAMKKLPPDTTRLTYKGRALKDTETLESLGVADGDKFVLITRTVGGRELASKD

SEQ ID NO: 524 - protein, 107 aa, Artificial Sequence
  Ub-(5)KDPGA(10) with N-terminal His-tag
MHHHHHHGSMKIKIVPAVGGGSPLELEVAPNATVGAVRTKVCAMKKLPPDTTRLTYKGRALKDTETLESLGVADGDKFVLITRTVGGRELASKDPGAFDADPLVVEI

SEQ ID NO: 525 - protein, 102 aa, Artificial Sequence
  PGA(10)-Ub with C-terminal His-tag
PGAFDADPLVVEIMKIKIVPAVGGGSPLELEVAPNATVGAVRTKVCAMKKLPPDTTRLTYKGRALKDTETLESLGVADGDKFVLITRTVGGCGEGSHHHHHH

SEQ ID NO: 526 - protein, 107 aa, Artificial Sequence
  Ub-(5)KDPGA(10) with N-terminal His-tag [M. jannaschii MtrA derived]
MHHHHHHGSMKIKIVPAVGGGSPLELEVAPNATVGAVRTKVCAMKKLPPDTTRLTYKGRALKDTETLESLGVADGDKFVLITRTVGGKECLSKDPGAIDEDPFIIEL

SEQ ID NO: 527 - protein, 107 aa, Artificial Sequence
  PGA(15) with C-terminal His-tag [M. jannaschii MtrA derived]
PGAIDEDPFIIELEGGKGMKIKIVPAVGGGSPLELEVAPNATVGAVRTKVCAMKKLPPDTTRLTYKGRALKDTETLESLGVADGDKFVLITRTVGGCGEGSHHHHHH

SEQ ID NO: 528 - protein, 18 aa, Methanosarcina mazei Go1
  M. mazei PGA(15)
PGAFDADPLVVEISEEGE

SEQ ID NO: 529 - protein, 8 aa, Methanosarcina mazei Go1
  M. mazei PGA(5)
PGAFDADP

SEQ ID NO: 530 - protein, 112 aa, Artificial Sequence
  M. mazei MtrA derived PGA(20) motif
PGAFDADPLVVEISEEGEEEEEGMKIKIVPAVGGGSPLELEVAPNATVGAVRTKVCAMKKLPPDTTRLTYKGRALKDTETLESLGVADGDKFVLITRTVGGCGEGSHHHHHH

SEQ ID NO: 531 - protein, 15 aa, Methanosarcina mazei Go1
  M. mazei (0)KDPGA(10)
KDPGAFDADPLVVEI

SEQ ID NO: 532 - protein, 20 aa, Methanosarcina mazei Go1
  M. mazei (5)KDPGA(10)
RELASKDPGAFDADPLVVEI

SEQ ID NO: 533 - protein, 25 aa, Methanosarcina mazei Go1
  M. mazei (10)KDPGA(10)
ITSKVRELASKDPGAFDADPLVVEI

SEQ ID NO: 534 - protein, 25 aa, Methanosarcina mazei Go1
  M. mazei (5)KDPGA(15)
RELASKDPGAFDADPLVVEISEEGE

SEQ ID NO: 535 - protein, 156 aa, Staphylococcus aureus
  SrtA5* delta 1-59 with C-terminal His-tag
MQAKPQIPKDKSKVAGYIEIPDADIKEPVYPGPATREQLNRGVSFAEENESLDDQNISIAGHTFIDRPNYQFTNLKAAKKGSMVYFKVGNETRKYKMTSIRNVKPTAVEVLDEQKGKDKQLTLITCDDYNEETGVWETRKIFVATEVKLEHHHHHH

SEQ ID NO: 536 - protein, 94 aa, Artificial Sequence
  Ub-GGSLPETGGG
MKIKIVPAVGGGSPLELEVAPNATVGAVRTKVCAMKKLPPDTTRLTYKGRALKDTETLESLGVADGDKFVLITRTVGGGGSLPETGGGHHHHHH

SEQ ID NO: 537 - protein, 96 aa, Artificial Sequence
  GGG-Ub
MHHHHHHGSENLYFQGGGMKIKIVPAVGGGSPLELEVAPNATVGAVRTKVCAMKKLPPDTTRLTYKGRALKDTETLESLGVADGDKFVLITRTVGG

SEQ ID NO: 538 - protein, 120 aa, Artificial Sequence
  M. mazei Ub-(5)KDPGA(10) with N-terminal Strep and C-terminal His-tag
MWSHPQFEKGSMKIKIVPAVGGGSPLELEVAPNATVGAVRTKVCAMKKLPPDTTRLTYKGRALKDTETLESLGVADGDKFVLITRTVGGCGERELASKDPGAFDADPLVVEIGSHHHHHH

SEQ ID NO: 539 - protein, 96 aa, Artificial Sequence
  M. mazei PGA(15)-Ub
PGAFDADPLVVEISEEGEMKIKIVPAVGGGSPLELEVAPNATVGAVRTKVCAMKKLPPDTTRLTYKGRALKDTETLESLGVADGDKFVLITRTVGG

SEQ ID NO: 540 - DNA, 47 bp, Artificial Sequence
  M. jannaschii MtrA delta174-240 with N-terminal His6-tag rvs Primer
ggtaacctcgagttataactcaattataaatgggtcttcgtcaatag

SEQ ID NO: 541 - DNA, 37 bp, Artificial Sequence
  M. jannaschii Adriase without NTN, with C-terminal His-tag fwd primer
cgtagtcatatggaacagttgaggaaacaactcatag

SEQ ID NO: 542 - DNA, 83 bp, Artificial Sequence; identical to SEQ ID NO: 403
  M. jannaschii Adriase without NTN, with C-terminal His-tag rvs primer

SEQ ID NO: 543 - DNA, 63 bp, Artificial Sequence; identical to SEQ ID NO: 411
  His-Ub fwd Primer

SEQ ID NO: 544 - DNA, 57 bp, Artificial Sequence
  Ub-His rvs primer
ggtaacctcgagttagtggtggtggtggtggtgagaaccttcgccgcagccgccaac

SEQ ID NO: 545 - DNA, 105 bp, Artificial Sequence
  M. mazei Ub-(5)KDPGA(15) with N-terminal His-tag rvs Primer
ggtaacctcgagttattcaccttcttcagagatttcaacaaccagcgggtcagcgtcgaaagcacccgggtctttagaagccagttcacggccgccaaccgtacg

SEQ ID NO: 546 - DNA, 90 bp, Artificial Sequence
  M. mazei Ub-(5)KDPGA(10) with N-terminal His-tag rvs Primer
ggtaacctcgagttagatttcaacaaccagcgggtcagcgtcgaaagcacccgggtctttagaagccagttcacggccgccaaccgtacg

SEQ ID NO: 547 - DNA, 51 bp, Artificial Sequence
  M. mazei Ub-(5)KD with N-terminal His-tag rvs Primer
ggtaacctcgagttagtctttagaagccagttcacggccgccaaccgtacg

SEQ ID NO: 548 - DNA, 76 bp, Artificial Sequence
  M. mazei PGA(10)-Ub with C-terminal His-tag fwd Primer
ggatcgcatatgccgggtgctttcgacgctgacccgctggttgttgaaatcatgaaaattaaaattgtacccgccg

SEQ ID NO: 549 - DNA, 91 bp, Artificial Sequence
  M. mazei PGA(15)-Ub with C-terminal His-tag fwd Primer
ggatcgcatatgccgggtgctttcgacgctgacccgctggttgttgaaatctctgaagaaggtgaaatgaaaattaaaattgtacccgccg

SEQ ID NO: 550 - protein, 106 aa, Artificial Sequence
  M. mazei PGA(20)-Ub with C-terminal His-tag fwd Primer
GGATCGCATATGCCGGGTGCTTTCGACGCTGACCCGCTGGTTGTTGAAATCTCTGAAGAAGGTGAAGAAGAAGAAGAAGGTATGAAAATTAAAATTGTACCCGCCG

SEQ ID NO: 551 - protein, 40 aa, Candidatus Methanoperedens sp. BLZ2
  (15)KDPGA(20)
EDENAIIAKIKELAAKDPGAFDGEPMIIQVGEAKEAEELG

SEQ ID NO: 552 - protein, 40 aa, Methanobacteriaceae archaeon 41_258
  (15)KDPGA(20)
EDPGQIQAKVKECIEKDPGAFEEEAMVIEVEEEEEEEVGE

SEQ ID NO: 553 - protein, 40 aa, Methanobacteriales archaeon HGW-Methanobacteriales-1
  (15)KDPGA(20)
EDAAAIQSKVKECIEKDPGAFEEEAMVIKVEEKGGEEEEG

SEQ ID NO: 554 - protein, 40 aa, Methanobacteriales archaeon HGW-Methanobacteriales-2
  Adriase recognition motif
EDAATIQSKVKECIDKDPGAFEEEAMVIEVEEDGEEEEGE

SEQ ID NO: 555 - protein, 40 aa, Methanobacterium arcticum
  (15)KDPGA(20)
EDAGQIQAKVKECIEKDPGAFEEEAMVIKVEEGGAEEEEG

SEQ ID NO: 556 - protein, 40 aa, Methanobacterium congolense
  (15)KDPGA(20)
EDPASIQSKVKECIEKDPGAFEEEAMVIEISEEDGEEEEG

SEQ ID NO: 557 - protein, 40 aa, Methanobacterium formicicum
  >Methanobacterium formicicum
EDAATIQSKVKECIDKDPGAFEEEAMVIVVEEDGEEEEGE

SEQ ID NO: 558 - protein, 40 aa, Methanobacterium lacus
  >Methanobacterium lacus
EDAAAIQAKVKECIEKDPGAIEEEAMVIEIEEEGEEEEGE

SEQ ID NO: 559 - protein, 40 aa, Methanobacterium paludis
  >Methanobacterium paludis
EDPAAISSKIKECIEKDPGAFEEEAMVIEVEEEGEEEEGE

SEQ ID NO: 560 - protein, 40 aa, Methanobacterium sp.
  >Methanobacterium sp.
EDPATISAKVKECIEKDPGAFEEEAMVVEVEEGGEEEEEG

SEQ ID NO: 561 - protein, 40 aa, Methanobacterium sp. BAmetb10
  >Methanobacterium sp. BAmetb10
EDAAAIQSKVKECVEKDPGAFEEEAMVIKVEEGGDEEEGE

SEQ ID NO: 562 - protein, 40 aa, Methanobacterium sp. BAmetb5
  >Methanobacterium sp. BAmetb5
EDAATIQSKVKECIDKDPGAFEEEAMVIKVEEGDGEEEEG

SEQ ID NO: 563 - protein, 40 aa, Methanobacterium sp. BRmetb2
  >Methanobacterium sp. BRmetb2
EDAAAIQSKVKECVEKDPGAFEEEAMVIEIEEEGEEDEGE

SEQ ID NO: 564 - protein, 40 aa, Methanobacterium sp. MB1
  >Methanobacterium sp. MB1
EDAATIQSKVKECIDKDPGAFEEEAMVIKVEEGEGDEEEG

SEQ ID NO: 565 - protein, 40 aa, Methanobacterium sp. PtaB.Bin024
  >Methanobacterium sp. PtaB.Bin024
EDAATIQSKVKECIDKDPGAFEEEAMVIEVEEGDGEEEEG

SEQ ID NO: 566 - protein, 40 aa, Methanobacterium sp. PtaU1.Bin097
  >Methanobacterium sp. PtaU1.Bin097
EDAAAIQSKIKECIEKDPGAFEEEAMVVKVEEGGEEEEEG

SEQ ID NO: 567 - protein, 40 aa, Methanobacterium sp. SMA-27
  >Methanobacterium sp. SMA-27
EDAAAIQAKVKECIEKDPGAIEEEAMVIVIEEEGEEEEGE

SEQ ID NO: 568 - protein, 40 aa, Methanobrevibacter arboriphilus
  >Methanobrevibacter arboriphilus
EDAGAIEAKVKECIEKDPGAFEEEAYVISLDDSGDEEDEG

SEQ ID NO: 569 - protein, 40 aa, Methanobrevibacter arboriphilus DSM 1125
  >Methanobrevibacter arboriphilus DSM 1125
EDAGAIEAKVKECIEKDPGAFEEDAYVISLDDSGDEEDEG

SEQ ID NO: 570 - protein, 40 aa, Methanobrevibacter boviskoreani
  >Methanobrevibacter boviskoreani /Methanobrevibacter sp. AbM4
EDVGAITAKVKECIEKDPGAIEEEAMVIDVSEGGEAEEDE

SEQ ID NO: 571 - protein, 40 aa, Methanobrevibacter curvatus
  >Methanobrevibacter curvatus
EDAGAIESKVKECISKDPGAFEEEALVISVDDAGGDDDDG

SEQ ID NO: 572 - protein, 40 aa, Methanobrevibacter filiformis
  >Methanobrevibacter filiformis
EDAAAIESKVKECIEKDPGAFEEEALVISVDDDGGDDDDD

SEQ ID NO: 573 - protein, 40 aa, Methanobrevibacter gottschalkii
  >Methanobrevibacter gottschalkii
EDIGNIQSKINECIEKDPGALEEDPIVMEVDEENQKLVIV

SEQ ID NO: 574 - protein, 40 aa, Methanobrevibacter millerae
  >Methanobrevibacter millerae
EDIGTIQSKINECVEKDPGAFEEEAMVISVDDDDGDEDEG

SEQ ID NO: 575 - protein, 40 aa, Methanobrevibacter olleyae
  >Methanobrevibacter olleyae
EDGGAITSKVKECIEKDPGAFEEDAMVIEVSEGDDDEDDG

SEQ ID NO: 576 - protein, 40 aa, Methanobrevibacter oralis
  >Methanobrevibacter oralis
EDIGTIQSKINECVEKDPGAFEEEAMVISVEGDDEEADSG

SEQ ID NO: 577 - protein, 40 aa, Methanobrevibacter ruminantium
  >Methanobrevibacter ruminantium
EDGGAITAKVKECIEKDPGAFEEDAMVIEVKEGDDDEDEG

SEQ ID NO: 578 - protein, 40 aa, Methanobrevibacter smithii
  >Methanobrevibacter smithii
EDVGAIQAKINECVEKDPGAFEEEAMVISVEGDDGEEDDG

SEQ ID NO: 579 - protein, 40 aa, Methanobrevibacter sp. 87.7
  >Methanobrevibacter sp. 87.7
EDGGAITSKVKECIEKDPGAFEEEALVVEVSDDDDEEDSG

SEQ ID NO: 580 - protein, 40 aa, Methanobrevibacter sp. NOE
  >Methanobrevibacter sp. NOE
EDAGAIEAKVKECIEKDPGAFEEEAYVISLDENGEEEDDG

SEQ ID NO: 581 - protein, 40 aa, Methanobrevibacter sp. YE315
  >Methanobrevibacter sp. YE315
EDIGAIQSKINECVEKDPGAFEEEAMVISVDDDGGDEEEG

SEQ ID NO: 582 - protein, 40 aa, Methanobrevibacter thaueri
  >Methanobrevibacter thaueri
EDIGAIQSKINECVEKDPGAFEEEAMVISVDDDGGEEEEG

SEQ ID NO: 583 - protein, 40 aa, Methanobrevibacter woesei
  >Methanobrevibacter woesei
EDVGAINAKISECVEKDPGAFEEEAMVISVEDDDGDADDG

SEQ ID NO: 584 - protein, 40 aa, Methanobrevibacter wolinii
  >Methanobrevibacter wolinii
EDGGAITSKVKECIEKDPGAFEEEALVVEVSDDDEEEDSG

SEQ ID NO: 585 - protein, 40 aa, Methanocaldococcus bathoardescens
  >Methanocaldococcus bathoardescens
EDTGKITQAIKECISKDPGAIDEDPMVIDLEGGGAKEGGE

SEQ ID NO: 586 - protein, 40 aa, Methanocaldococcus fervens AG86
  >Methanocaldococcus fervens AG86
EDVNKITQAIKECISKDPGAIDEEPIVLELESGGEGTEEE

SEQ ID NO: 587 - protein, 40 aa, Methanocaldococcus infernus ME
  >Methanocaldococcus infernus ME
EDIGKITQAIKECLSKDPGAIDEDPYIIQLEGGGGEEEGK

SEQ ID NO: 588 - protein, 40 aa, Methanocaldococcus jannaschii DSM 2661
  >Methanocaldococcus jannaschii DSM 2661
EDIGKITQAIKECLSKDPGAIDEDPFIIELEGGKGGGEEE

SEQ ID NO: 589 - protein, 40 aa, Methanocaldococcus sp. FS406-22
  >Methanocaldococcus sp. FS406-22
EDVGKITQAIKECLSKDPGAIDEDPFIIELEGGKGGGEEE

SEQ ID NO: 590 - protein, 40 aa, Methanocaldococcus villosus KIN24-T80
  >Methanocaldococcus villosus KIN24-T80
EDINKITQAIKECISKDPGAIDEEPMILELEGGAKGEEGE

SEQ ID NO: 591 - protein, 40 aa, Methanocaldococcus vulcanius M7
  >Methanocaldococcus vulcanius M7
EDVGKITQAIKECLSKDPGAIDEDPFIIQLEGGKGGEEEE

SEQ ID NO: 592 - protein, 40 aa, Methanococcales archaeon HHB
  >Methanococcales archaeon HHB / Methanofervidicoccus abyssi HHB
EDIGKITQAIKECISKDPGATEEDAEEIDLDKKESGLPTV

SEQ ID NO: 593 - protein, 40 aa, Methanococcus aeolicus Nankai-3
  >Methanococcus aeolicus Nankai-3
EDTGKISSAIKDCISKDPGAFEEDPMILDLEGGGGEAGAD

SEQ ID NO: 594 - protein, 40 aa, Methanococcus maripaludis
  >Methanococcus maripaludis
EDTGKISDAIKNCISKDPGAFEEDPMVIELEGGAAAAGEE

SEQ ID NO: 595 - protein, 40 aa, Methanococcus maripaludis C5
  >Methanococcus maripaludis C5
EDKGKIADAIKNCISKDPGAFEEDPMVIELEGGAAAAGDE

SEQ ID NO: 596 - protein, 40 aa, Methanococcus maripaludis C6
  >Methanococcus maripaludis C6
EDTAKIAAAIKNCTSQDPDALDEEPMVVDLEGGEAVAGTE

SEQ ID NO: 597 - protein, 40 aa, Methanococcus maripaludis C7
  >Methanococcus maripaludis C7
EDTAKIAAAIKNCTSQDPDAIDEEPMVVDLEGGEAVANTE

SEQ ID NO: 598 - protein, 40 aa, Methanococcus maripaludis S2
  >Methanococcus maripaludis S2
EDTGKISDAIKNCISKDPGAFEEEPMVIELEGGAAAAGEE

SEQ ID NO: 599 - protein, 40 aa, Methanococcus vannielii SB
  >Methanococcus vannielii SB
EDKGKITEAIKNCISKDPGALEEDAMVVELEGGKKVAGED

SEQ ID NO: 600 - protein, 40 aa, Methanococcus voltae A3
  >Methanococcus voltae A3
EDKGKIQQTVKDCISKDPGAFEEDAMVIDLEGKAGGAGEE

SEQ ID NO: 601 - protein, 40 aa, Methanoculleus bourgensis
  >Methanoculleus bourgensis
EDMGTIKAKIDELKAKDPGAFPAEPMIVEVKEAGGAGAEE

SEQ ID NO: 602 - protein, 38 aa, Methanoculleus chikugoensis
  >Methanoculleus chikugoensis
MGAIKAKIDELKAKDPGAFGAEPMIVEVKEAAGAGAEE

SEQ ID NO: 603 - protein, 40 aa, Methanoculleus horonobensis
  >Methanoculleus horonobensis
EDMGAIKAKMDELKAKDPGAFGAEPMIVEVKEAGGAAEEA

SEQ ID NO: 604 - protein, 40 aa, Methanoculleus marisnigri  JR1
  >Methanoculleus marisnigri JR1
EDMGAIKAKIDELKARDPGAFGAEPMIVEVKEAGGAAEEA

SEQ ID NO: 605 - protein, 40 aa, Methanoculleus sediminis
  >Methanoculleus sediminis / Methanoculleus sp. MH98A
EDMGAIKAKIDELKARDPGAFGAEPMIVEVKEAGGAGAEE

SEQ ID NO: 606 - protein, 40 aa, Methanoculleus sp. MAB1
  >Methanoculleus sp. MAB1
EDMGTIKAKIDELKAKDPGAFPEEPMVVEVKEAGGGAAEV

SEQ ID NO: 607 - protein, 40 aa, Methanoculleus sp. SDB
  >Methanoculleus sp. SDB
EDMGAISAKISELVGKDPGAFDADPMVVEVKEEGAGGGAA

SEQ ID NO: 608 - protein, 40 aa, Methanoculleus taiwanensis
  >Methanoculleus taiwanensis
EDMGAISAKIKELTARDPGAFGADPMIIEVKEAGGAEEEV

SEQ ID NO: 609 - protein, 40 aa, Methanoculleus thermophilus
  >Methanoculleus thermophilus
EDMGTIKAKINELKARDPGAFGAEPMVVEVKEAGGEGAEE

SEQ ID NO: 610 - protein, 40 aa, Methanofollis ethanolicus
  >Methanofollis ethanolicus
EDLGAIKAKIAELKGKDPGAFGEAPIVVEVKEEGGGAEEE

SEQ ID NO: 611 - protein, 40 aa, Methanolinea sp. SDB
  >Methanolinea sp. SDB
EDMGAIKAKIDELKGKDPGAFAADPMVVEVKEAEGGIEVA

SEQ ID NO: 612 - protein, 40 aa, Methanolinea tarda
  >Methanolinea tarda
EDLGAIKAKIAELKGRDPGAFAADPMVVEVKEAAGGGAEE

SEQ ID NO: 613 - protein, 40 aa, Methanopyrus kandleri AV19
  >Methanopyrus kandleri AV19 / Methanopyrus sp. KOL6
EDVDEIVKAIEECVEKDPGAYEEGPMTISLEEEEEEELAE

SEQ ID NO: 614 - protein, 40 aa, Methanoregulaceae archaeon PtaU1.Bin059
  >Methanoregulaceae archaeon PtaU1.Bin059
EDLGAIKAKINELKGRDPGAFAADPMVVEVKEAAGGVEET

SEQ ID NO: 615 - protein, 40 aa, Methanosaeta harundinacea
  >Methanosaeta harundinacea
EDTGTIVSKIKECISKDPGALDVEPMTVEISEGGAEEEAH

SEQ ID NO: 616 - protein, 40 aa, Methanosaeta sp. PtaB.Bin087
  >Methanosaeta sp. PtaB.Bin087
EDTGTIVSRIKECISKDPGALDAEPMTIVISEGAAEEEAH

SEQ ID NO: 617 - protein, 40 aa, Methanosaeta sp. PtaU1.Bin112
  >Methanosaeta sp. PtaU1.Bin112
EDMGAITGKIKELVSKDPGALDVDPMTIEIKEGGEEESAG

SEQ ID NO: 618 - protein, 40 aa, Methanosarcina acetivorans C2A
  >Methanosarcina acetivorans C2A
EDMGAITAKVRELVAKDPGAFDAEPMVVEISEEGEEEEEG

SEQ ID NO: 619 - protein, 40 aa, Methanosarcina barkeri  CM1
  >Methanosarcina barkeri CM1 / Methanosarcina barkeri str. Fusaro
EDMGAITSKVKELASKDPGAFDAEPMIVEISEEGEEEEEG

SEQ ID NO: 620 - protein, 40 aa, Methanosarcina barkeri 3
  >Methanosarcina barkeri 3
EDMGAITSKVRELASKDPGAFEAEPLVVEISEEGGEEEEG

SEQ ID NO: 621 - protein, 40 aa, Methanosarcina flavescens
  >Methanosarcina flavescens
EDMGAITAKVRELASKDPGAFDAEPMIVEISEEGEEEEEG

SEQ ID NO: 622 - protein, 40 aa, Methanosarcina horonobensis
  >Methanosarcina horonobensis
EDMGAITAKVRELVAKDPGAFDADPLVVEISEEGEEEEEG

SEQ ID NO: 623 - protein, 40 aa, Methanosarcina lacustris Z-7289
  >Methanosarcina lacustris Z-7289
EDMGAITAKVRELVSKDPGAFDAEPMVVVISDEGEEEEDA

SEQ ID NO: 624 - protein, 40 aa, Methanosarcina siciliae C2
  >Methanosarcina mazei / Methanosarcina siciliae C2
EDMGAITSKVRELASKDPGAFDADPLVVEISEEGEEEEEG

SEQ ID NO: 625 - protein, 40 aa, Methanosarcina siciliae
  >Methanosarcina siciliae
EDMGAITAKVRELVSKDPGAFDAEPLVVEISEEGEEEEEG

SEQ ID NO: 626 - protein, 40 aa, Methanosarcina sp. 1.H.A.2.2
  >Methanosarcina sp. 1.H.A.2.2 / Methanosarcina sp. 2.H.A.1B.4
EDMGAITAKVRELASKDPGAFDAEPMVVVISDEGEEEEEA

SEQ ID NO: 627 - protein, 40 aa, Methanosarcina sp. 1.H.T.1A.1
  >Methanosarcina sp. 1.H.T.1A.1 /Methanosarcina sp. 2.H.T.1A.3
EDMGAITAKVRELVSKDPGAFDAEPMVVEISEEGEEEEEG

SEQ ID NO: 628 - protein, 40 aa, Methanosarcina sp. Ant1
  >Methanosarcina sp. Ant1
EDMGAITSKIRELVSKDPGAFDADPLILQIAAGEEEEEVS

SEQ ID NO: 629 - protein, 40 aa, Methanosarcina spelaei
  >Methanosarcina spelaei /Methanosarcina vacuolata /Methanosarcina sp. Kolksee
EDMGAITSKVRELASKDPGAFDAEPLVVEISEEGGEEEEG

SEQ ID NO: 630 - protein, 40 aa, Methanosarcina sp. MSH10X1
  >Methanosarcina sp. MSH10X1
EDMGAITSKVRELASKDPGAFDADPLVVEISEEGGEEEEG

SEQ ID NO: 631 - protein, 40 aa, Methanosarcina sp. MTP4
  >Methanosarcina sp. MTP4
EDMGVITAKVKELVSKDPGAFDAEPLVVEISEEGEGEEDV

SEQ ID NO: 632 - protein, 40 aa, Methanosarcina sp. WWM596
  >Methanosarcina sp. WWM596
EDMGAITAKVRELVSKDPGAFDAEPMVVVISEEGEEEEEG

SEQ ID NO: 633 - protein, 40 aa, Methanosarcina thermophila
  >Methanosarcina thermophila
EDMGVITAKVRELASKDPGAFDAEPMIVEISEEGEGEEEE

SEQ ID NO: 634 - protein, 40 aa, Methanothermobacter defluvii
  >Methanothermobacter defluvii / Methanothermobacter sp. CaT2 / Methanothermobacter sp. EMTCatA1 / Methanothermobacter thermautotrophicus
EDADAIKAKVKECIEKDPGAFEEEAMVIKVEEGGEEEEGE

SEQ ID NO: 635 - protein, 40 aa, Methanothermobacter marburgensis
  >Methanothermobacter marburgensis /Methanothermobacter wolfeii
EDADAIKAKVKECIEKDPGAFEEEAMIIKVEEGGEEEEGE

SEQ ID NO: 636 - protein, 40 aa, Methanothermobacter sp. MT-2
  >Methanothermobacter sp. MT-2
EDPGPIQSKVKECIEKDPGAFEEEAMVIEVEEEGEEEVGE

SEQ ID NO: 637 - protein, 40 aa, Methanothermobacter tenebrarum
  >Methanothermobacter tenebrarum
EDPEQIKAKVKECIEKDPGAFEEEAMVIEVEEEAEEEVGE

SEQ ID NO: 638 - protein, 30 aa, Methanothermus fervidus DSM 2088
  >Methanothermus fervidus DSM 2088
EDADQIKEKVKECIEKDPGAFEEEEVILRL

SEQ ID NO: 639 - protein, 40 aa, Methanothrix soehngenii
  >Methanothrix soehngenii
EDIGAIAGKVKELASKDPGALDVEPMAIEIKEGGEEEEAG

SEQ ID NO: 640 - protein, 40 aa, Methanothrix thermoacetophila PT
  >Methanothrix thermoacetophila PT
EDMGAITAKIKELVAKDPGALDVEPMIVEIKEGAGEEGEA

SEQ ID NO: 641 - protein, 40 aa, Methanotorris formicicus Mc-S-70
  >Methanotorris formicicus Mc-S-70
EDTGKITSAIKECISKDPGAIDEESMVLELEGGGTAGEEG

SEQ ID NO: 642 - protein, 40 aa, Methanotorris igneus Kol 5
  >Methanotorris igneus Kol 5
EDVSKITAAIKECISKDPGAIDEEPMVLDLEGGGAGGEEE

SEQ ID NO: 643 - protein, 40 aa, Methanobacterium formicicum DSM 3637
  >Methanobacterium formicicum DSM 3637
EDAATIQSKVKECIDKDPGAFEEEAMVIKVEEGDGDEEEG

SEQ ID NO: 644 - protein, 40 aa, Methanothermococcus okinawensis IH1
  >Methanothermococcus okinawensis IH1
EDTGKISSAVKECISKDPGAIDEDPFIIELEGGAGGEEEE

SEQ ID NO: 645 - protein, 35 aa, Methanobacterium sp. PtaU1.Bin097
  Methanobacterium sp. PtaU1.Bin097 secondary (15)KDPGA(20)
EDRSEITAQIQGCIEKDPGAVEEETVVIKLPEKKG

SEQ ID NO: 646 - protein, 35 aa, Methanobacterium sp. Maddingley MBC34
  Methanobacterium sp. Maddingley MBC34 secondary (15)KDPGA(20)
EDAAAIQSKVKDCIEKDPGAVESETMIIKLNEDNN

SEQ ID NO: 647 - protein, 35 aa, Methanobacterium sp. PtaB.Bin024
  Methanobacterium sp. PtaB.Bin024 secondary (15)KDPGA(20)
EDAAAIQSQVKECIEKDPGAAEEETMVIEIEEEGE

SEQ ID NO: 648 - protein, 35 aa, Methanobacterium subterraneum
  Methanobacterium subterraneum secondary (15)KDPGA(20)
EDATTIQSKVKECIEKDPGAVESETMVIELEEEGS

SEQ ID NO: 649 - protein, 35 aa, Methanobacterium bryantii
  Methanobacterium bryantii secondary (15)KDPGA(20)
EDAGQIQGKVKECIEKDPGAYEEEPIAIRLDELEK

SEQ ID NO: 650 - protein, 35 aa, Methanobrevibacter wolinii
  Methanobrevibacter wolinii secondary (15)KDPGA(20)
EDGGAITSKVKECIEKDPGAFEEKSMVISIDEDSE

SEQ ID NO: 651 - protein, 35 aa, Methanobrevibacter thaueri
  Methanobrevibacter thaueri secondary (15)KDPGA(20)
EDIGAIQSKINECVEKDPGALEEDPIVMEVDEENQ

SEQ ID NO: 652 - protein, 35 aa, Methanobrevibacter sp. YE315
  Methanobrevibacter sp. YE315 secondary (15)KDPGA(20)
EDIGAIQSKINECVEKDPGALEEDPIVMEVDEENE

SEQ ID NO: 653 - protein, 35 aa, Methanoculleus sp. MH98A
  Methanoculleus sp. MH98A secondary (15)KDPGA(20)
EDMGVIKAKIDELKARDPGAFGAEPMVVEVKEAGG

SEQ ID NO: 654 - protein, 35 aa, Methanoculleus sp. SDB
  Methanoculleus sp. SDB secondary (15)KDPGA(20)
EDMGAISAKISELVGKDPGAFDADPMVVEVKEEGA

SEQ ID NO: 655 - protein, 35 aa, Methanoculleus horonobensis
  Methanoculleus horonobensis secondary (15)KDPGA(20)
EDMGAIKAKMDELKARDPGAFGAEPMIVEVKEAGG

SEQ ID NO: 656 - protein, 35 aa, Methanoculleus taiwanensis
  Methanoculleus taiwanensis secondary (15)KDPGA(20)
EDMGAISAKIKELTARDPGAFGAEPMIIEVKEAGG

SEQ ID NO: 657 - protein, 35 aa, Methanoculleus sp. MAB1
  Methanoculleus sp. MAB1 secondary (15)KDPGA(20)
EDMGTIKAKIDELKAKDPGAFPEEPMVVEVKEAGG

SEQ ID NO: 658 - protein, 35 aa, Methanococcus maripaludis C7
  Methanococcus maripaludis C7 secondary (15)KDPGA(20)
EDTGKISAAVKSCISKDPGAFDAEPMIIELDGGGA

SEQ ID NO: 659 - protein, 35 aa, Methanococcus maripaludis C6
  Methanococcus maripaludis C6 secondary (15)KDPGA(20)
EDTGKIAAAVKNCISKDPGAFDGEPMIIELDGGGA

SEQ ID NO: 660 - protein, 35 aa, Methanococcus aeolicus Nankai-3
  Methanococcus aeolicus Nankai-3 secondary (15)KDPGA(20)
EDTGKISSVIKDCISKDPGAFEEDPMILDLEGGGG

SEQ ID NO: 661 - protein, 35 aa, Methanotorris formicicus Mc-S-70
  Methanotorris formicicus Mc-S-70 secondary (15)KDPGA(20)
EDTGKITSAIKECISKDPGAIDEEPMVLELEGGGA

SEQ ID NO: 662 - protein, 159 aa, Staphylococcus aureus
  His6-SrtA1-59
MRGSHHHHHHGSQAKPQIPKDKSKVAGYIEIPDADIKEPVYPGPATPEQLNRGVSFAEENESLDDQNISIAGHTFIDRPNYQFTNLKAAKKGSMVYFKVGNETRKYKMTSIRDVKPTDVEVLDEQKGKDKQLTLITCDDYNEKTGVWEKRKIFVATEVK

SEQ ID NO: 663 - protein, 155 aa, Lama glama
  PGA(10)-sdAb
MPGAFDADPLVVEIMAEVQLVESGGGLVQAGDSLRLSCTASGRTLGDYGVAWFRQAPGKEREFVSVISRSTIITDYADSVRGRFSISADSAKNTVYLQMNSLKPEDTAVYYCAVIANPVYATSRNSDDYGHWGQGTQVTVSSAAALEGSHHHHHH

SEQ ID NO: 664 - protein, 203 aa, Rhinopithecus roxellana
  PGA(10)-CyP
MPGAFDADPLVVEIMGFADAAAEEILVVLAMVNPTVFFDIAVDGEPLGRVSFELFADKVPKTAENFRALSTGEKGFGYKGSCFHRIIPGFMCQGGDFTRHNGTGGKSIYGEKFEDENFILKHTGPGILSMANAGPNTNGSQFFICTAKTEWLDGKHVVFGKVKEGMNIVEAMERFGSRNGKTSKKITIADCGQLEGSHHHHHH

SEQ ID NO: 665 - protein, 246 aa, Escherichia coli
  PGA(10)-GST
MPGAFDADPLVVEIMSPILGYWKIKGLVQPTRLLLEYLEEKYEEHLYERDEGDKWRNKKFELGLEFPNLPYYIDGDVKLTQSMAIIRYIADKHNMLGGCPKERAEISMLEGAVLDIRYGVSRIAYSKDFETLKVDFLSKLPEMLKMFEDRLCHKTYLNGDHVTHPDFMLYDALDVVLYMDPMCLDAFPKLVCFKKRIEAIPQIDKYLKSSKYIAWPLQGWQATFGGGDHPPKSDGSSGSSHHHHHH

SEQ ID NO: 666 - protein, 81 aa, Caldiarchaeum subterraneum
  GGG-Ub
GGGMKIKIVPAVGGGSPLELEVAPNATVGAVRTKVCAMKKLPPDTTRLTYKGRALKDTETLESLGVADGDKFVLITRTVGG

SEQ ID NO: 667 - protein, 296 aa, Methanocaldococcus jannaschii
  N-terminally modified M. jannaschii Adriase after Thrombin-cleavage
GSHMSLIICYYGKNGAVIGGDRRQIFFRGSEENRKILEEKLYSGEIKSEEELYKLAEKLNIKIIIEDDREKVRKISDSVVCGEVRSLGIDAKRRRVYATKGKCAIVDILNDTVTNQTIKEGFGIVVLGNRFLKKKAEEELKRTAKLFPMMPIQQIEDAIKEIFEKLKWHPTVSKEYDIYSVNKYEKNFEEVIKKDIESLFKYREQLRKQLIDFGKVMSIVNKIVKNGEIGVIKDGKLHLYDDYIAIDKIDPNPKVFKVVDVEGNFKDGDIVVIENGDMKIKGTNEKVTTKYIIIHK

1. A polypeptide comprising an N-terminal DUF2121 domain having an N-terminal serine or threonine residue.

2. The polypeptide of claim 1, wherein said polypeptide has transpeptidase activity.

3. The polypeptide of claim 2, wherein the DUF2121 domain has the amino acid sequence of SEQ ID NO: 2 or an amino acid sequence having at least 20% sequence identity thereto.

4. The polypeptide of claim 2, wherein the DUF2121 domain has an amino acid sequence selected from the group consisting of
(i) SEQ ID NOs: 4 to 143;
(ii) an amino acid sequence having at least 60% sequence identity to the amino acid sequences of (i); and
(iii) an amino acid sequence as defined in (i) or (ii) wherein one to 10 amino acid residues are deleted, inserted or added.

5. The polypeptide of claim 2, wherein the polypeptide has an amino acid sequence selected from the group consisting of
(i) SEQ ID NOs: 86 to 225;
(ii) an amino acid sequence having at least 60% sequence identity to the amino acid sequences of (i); and
(iii) an amino acid sequence as defined in (i) or (ii) wherein one to 10 amino acid residues are deleted, inserted or added
wherein the polypeptide has transpeptidase activity.

6. The polypeptide of claim 2, wherein the transpeptidase activity comprises the capability of catalyzing the formation of a peptide bond between the C-terminal residue of an N-terminal portion of a first substrate polypeptide and the N-terminal residue of a C-terminal portion of a second substrate polypeptide so as to form a fusion polypeptide comprising the N-terminal portion of the first substrate polypeptide and the C-terminal portion of the second substrate polypeptide C-terminally fused thereto, wherein the first and the second substrate polypeptide each comprise a DUF2121 recognition motif comprising a sequence selected from the group consisting of SEQ ID NOs: 308, 309, 310 and 311, preferably SEQ ID NOs:310 and 311, most preferably SEQ ID NO: 311.

7. The polypeptide of claim 2, wherein the transpeptidase activity comprises the capability of catalyzing the formation of a peptide bond between the N-terminal portion of a first substrate polypeptide and a C-terminal portion of a second substrate polypeptide so as to form a fusion polypeptide comprising the N-terminal portion of the first substrate polypeptide and the C-terminal portion of the second substrate polypeptide C-terminally fused thereto, wherein the first and second substrate polypeptides each comprise a DUF2121 recognition motif comprising a sequence selected from the group consisting of SEQ ID NOs: 308, 309, 310 and 311, preferably SEQ ID NOs: 310 and 311, most preferably SEQ ID NO: 311, wherein the N-terminal portion of the first substrate peptide is defined from the N-terminus of the first substrate peptide to the aspartate residue in position 2 of SEQ ID NOs: 308, 309, 310 and/or 311, and wherein the C-terminal portion of the second substrate polypeptide is defined from the proline residue in position 3 of SEQ ID NOs: 308 to 311 to the C-terminus of the sequence of the second substrate polypeptide.

8. The polypeptide of claim 2, wherein the transpeptidase activity comprises the capability of catalyzing the formation of a peptide bond between an N-terminal portion of a first substrate polypeptide and the N-terminal residue of a second substrate polypeptide so as to form a fusion polypeptide comprising the N-terminal portion of the first substrate polypeptide and the second substrate polypeptide C-terminally fused thereto, the first substrate polypeptide comprising a DUF2121 recognition motif, said DUF2121 recognition motif comprising a sequence selected from the group consisting of SEQ ID NOs:308, 309, 310 and 311, preferably SEQ ID NO:310 and 311, most preferably SEQ ID NO: 311, wherein the N-terminal portion of the first substrate polypeptide is defined from the N-terminus to the aspartate residue in position 2 of SEQ ID NO: 308, 309, 310 and/or 311, and wherein the second substrate polypeptide has at its N-terminus the C-terminal portion of a DUF2121 recognition motif starting with the amino acids defined in positions 3 to 5 of any one of SEQ ID NOs: 308 to 311.

9. The polypeptide of claim 1, wherein the polypeptide further comprises C-terminally an OB-like domain, preferably an OB-like domain having an amino acid sequence selected from the group consisting of SEQ ID NOs 226 to 307 or an amino acid sequence having at least 60% sequence identity to said amino acid sequence.

10. A transpeptidase:
(A) comprising an DUF2121 domain having an N-terminal serine or threonine residue, and wherein said polypeptide comprises
(i) an amino acid sequence of SEQ ID NO: 2 or an amino acid sequence having at least 20% sequence identity thereto;
(ii) an amino acid sequence selected from the group consisting of any one of SEQ ID NOs: 4 to 225 and an amino acid sequence having at least 60% sequence identity thereto; or
(iii) a combination thereof; and
wherein said polypeptide having transpeptidase activity further comprises at least one additional amino acid residue N-terminally of the sequences as defined in (i) or (ii); and wherein the residue(s) N-terminally of the sequences as defined in (i) or (ii) is/are removed to obtain transpeptidase activity; or
(B) comprising or consisting of an DUF2121 domain having an N-terminal serine or threonine residue,
(iv) wherein said DUF2121 domain has an amino acid sequence of SEQ ID NO: 2 or an amino acid sequence having at least 20% sequence identity thereto;
(v) wherein said transpeptidase has an amino acid sequence selected from the group consisting of any one of SEQ ID NOs: 4 to 225 and an amino acid sequence having at least 60% sequence identity thereto; or
(vi) a combination thereof;
wherein said transpeptidase further comprises at least one additional amino acid residue N-terminally of the sequences as defined in (iv) or (v).

11. (canceled)

12. The polypeptide of claim 10, wherein the transpeptidase activity is DUF2121 transpeptidase activity.

13. The polypeptide of claim 10, wherein the transpeptidase activity comprises:
(i) the capability of catalyzing the formation of a peptide bond between the C-terminal residue of an N-terminal portion of a first substrate polypeptide and the N-terminal residue of a C-terminal portion of a second substrate polypeptide so as to form a fusion polypeptide comprising the N-terminal portion of the first substrate polypeptide and the C-terminal portion of the second substrate polypeptide C-terminally fused thereto, wherein the first and the second substrate polypeptide each comprise a DUF2121 recognition motif comprising a sequence selected from the group consisting of SEQ ID NOs: 308, 309, 310 and 311, preferably SEQ ID NOs:310 and 311, most preferably SEQ ID NO: 311;
(ii) the capability of catalyzing the formation of a peptide bond between the N-terminal portion of a first substrate polypeptide and a C-terminal portion of a second substrate polypeptide so as to form a fusion polypeptide comprising the N-terminal portion of the first substrate polypeptide and the C-terminal portion of the second substrate polypeptide C-terminally fused thereto, wherein the first and second substrate polypeptides each comprise a DUF2121 recognition motif comprising a sequence selected from the group consisting of SEQ ID NOs: 308, 309, 310 and 311, preferably SEQ ID NOs: 310 and 311, most preferably SEQ ID NO: 311, wherein the N-terminal portion of the first substrate peptide is defined from the N-terminus of the first substrate peptide to the aspartate residue in position 2 of SEQ ID NOs: 308, 309, 310 and/or 311, and wherein the C-terminal portion of the second substrate polypeptide is defined from the proline residue in position 3 of SEQ ID NOs: 308 to 311 to the C-terminus of the sequence of the second substrate polypeptide; or
(iii) the capability of catalyzing the formation of a peptide bond between an N-terminal portion of a first substrate polypeptide and the N-terminal residue of a second substrate polypeptide so as to form a fusion polypeptide comprising the N-terminal portion of the first substrate polypeptide and the second substrate polypeptide C-terminally fused thereto, the first substrate polypeptide comprising a DUF2121 recognition motif, said DUF2121 recognition motif comprising a sequence selected from the group consisting of SEQ ID NOs:308, 309, 310 and 311, preferably SEQ ID NO:310 and 311, most preferably SEQ ID NO: 311, wherein the N-terminal portion of the first substrate polypeptide is defined from the N-terminus to the aspartate residue in position 2 of SEQ ID NO: 308, 309, 310 and/or 311, and wherein the second substrate polypeptide has at its N-terminus the C-terminal portion of a DUF2121 recognition motif starting with the amino acids defined in positions 3 to 5 of any one of SEQ ID NOs: 308 to 311.

14. The polypeptide of claim 10, wherein the polypeptide further comprises C-terminally an OB-like domain.

15. The polypeptide of claim 1, wherein said polypeptide is attached to a solid carrier.

16. A nucleic acid encoding the polypeptide of claim 1.

17. A vector comprising the nucleic acid of claim 16.

18. (canceled)

19. A host cell comprising the nucleic acid of claim 16.

20-21. (canceled)

22. A method for producing a polypeptide of claim 1 comprising:
a) cultivating a host cell comprising a nucleic acid encoding the polypeptide of claim 1; and
b) recovering said polypeptide from the cell culture and/or the cells.

23. A method for producing a fusion polypeptide comprising contacting the polypeptide of claim 1 with a first substrate polypeptide and a second substrate polypeptide, and reacting both substrate polypeptides.

24-65. (canceled)

66. A method for producing a circular polypeptide, comprising producing the circular polypeptide by bringing the polypeptide of claim 1 into contact with a substrate polypeptide and reacting the substrate polypeptide.

67-75. (canceled)
